United States Patent Application Publication US 2025/0320452 A1 - sequence listing, part 9

SEQ ID NO: 7 - DNA, 3977487 bp, synthetic construct (residues 1-1,988,744 of 3,977,487)
  source 1..3977487: mol_type = other DNA; note = Synthetic E.coli genome
agcttttcattctgactgcaacgggcaatatgtctctgtgtggattaaaaaaagagtgtctgatagcagcttctgaactggttacctgccgtgagtaaattaaaattttattgacttaggtcactaaatactttaaccaatataggcatagcgcacagacagataaaaattacagagtacacaacatccatgaaacgcattagcaccaccattaccaccaccatcaccattaccacaggtaacggtgcgggctgacgcgtacaggaaacacagaaaaaagcccgcacctgacagtgcgggcttttttttttcgaccaaaggtaacgaggtaacaaccatgcgagtgttgaagttcggcggtacaagtgtggcaaatgcagaacgttttctgcgtgttgccgatattctggaaagcaatgccaggcaggggcaggtggccaccgtcctctctgcccccgccaaaatcaccaaccacctggtggcgatgattgaaaaaaccattagcggccaggatgctttacccaatatcagcgatgccgaacgtatttttgccgaacttttgacgggactcgccgccgcccagccggggttcccgctggcgcaattgaaaactttcgtcgatcaggaatttgcccaaataaaacatgtcctgcatggcattagtttgttggggcagtgcccggatagcatcaacgctgcgctgatttgccgtggcgagaaaatgagcatcgccattatggccggcgtattagaagcgcgcggtcacaacgttactgttatcgatccggtcgaaaaactgctggcagtggggcattacctcgaatctaccgtcgatattgctgagtccacccgccgtattgcggcaagccgcattccggctgatcacatggtgctgatggcaggtttcaccgccggtaatgaaaaaggcgaactggtggtgcttggacgcaacggttccgactactctgctgcggtgctggctgcctgtttacgcgccgattgttgcgagatttggacggacgttgacggggtctatacctgcgacccgcgtcaggtgcccgatgcgaggttgttgaagagcatgtcctaccaggaagcgatggagctttcctacttcggcgctaaagttcttcacccccgcaccattacccccatcgcccagttccagatcccttgcctgattaaaaataccggaaatcctcaagcaccaggtacgctcattggtgccagccgtgatgaagacgaattaccggtcaagggcatttccaatctgaataacatggcaatgttcagcgtttctggtccggggatgaaagggatggtcggcatggcggcgcgcgtctttgcagcgatgagtcgcgcccgtatttccgtggtgctgattacgcaaagttcttccgaatacagcatcagtttctgcgttccacaaagcgactgtgtgcgagctgaacgggcaatgcaggaagagttctacctggaactgaaagaaggcttactggagccgctggcagtgacggaacggctggccattatcagcgtggtaggtgatggtatgcgcaccttgcgtgggatcagcgcgaaattctttgccgcactggcccgcgccaatatcaacattgtcgccattgctcagggatcttctgaacgcagtatctctgtcgtggtaaataacgatgatgcgaccactggcgtgcgcgttactcatcagatgctgttcaataccgatcaggttatcgaagtgtttgtgattggcgtcggtggcgttggcggtgcgctgctggagcaactgaagcgtcagcaaagctggctgaagaataaacatatcgacttacgtgtctgcggtgttgccaacagcaaggctctgctcaccaatgtacatggccttaatctggaaaactggcaggaagaactggcgcaagccaaagagccgtttaatctcgggcgcttaattcgcctcgtgaaagaatatcatctgctgaacccggtcattgttgactgcacttccagccaggcagtggcggatcaatatgccgacttcctgcgcgaaggtttccacgttgtcacgccgaacaaaaaggccaacaccagcagcatggattactaccatcagttgcgttatgcggcggaaaaaagccggcgtaaattcctctatgacaccaacgttggggctggattaccggttattgagaacctgcaaaatctgctcaatgcaggtgatgaattgatgaagttctccggcattctttctggtagcctttcttatatcttcggcaagttagacgaaggcatgagtttctccgaggcgaccacgctggcgcgggaaatgggttataccgaaccggacccgcgagatgatctttctggtatggatgtggcgcgtaaactattgattctcgctcgtgaaacgggacgtgaactggagctggcggatattgaaattgaacctgtgctgcccgcagagtttaacgccgagggtgatgttgccgcttttatggcgaatctgagtcaactcgacgatctctttgccgcgcgcgtggcgaaggcccgtgatgaaggaaaagttttgcgctatgttggcaatattgatgaagatggcgtctgccgcgtgaagattgccgaagtggatggtaatgatccgctgttcaaagtgaaaaatggcgaaaacgccctggccttctatagccactattatcagccgctgccgttggtactgcgcggatatggtgcgggcaatgacgttacagctgccggtgtctttgctgatctgctacgtaccctcagttggaagttaggagtctgacatggttaaagtttatgccccggcttccagtgccaatatgagcgtcgggtttgatgtgctcggggcggcggtgacacctgttgatggtgcattgctcggagatgtagtcacggttgaggcggcagagacattcagtctcaacaacctcggacgctttgccgataagctgccgagtgaaccacgggaaaatatcgtttatcagtgctgggagcgtttttgccaggaactgggtaagcaaattccagtggcgatgaccctggaaaagaatatgccgatcggtagcggcttaggctccagtgcctgtagcgtggtcgcggcgctgatggcgatgaatgaacactgcggcaagccgcttaatgacactcgtttgctggctttgatgggcgagctggaaggccgtatctccggcagcattcattacgacaacgtggcaccgtgttttctcggtggtatgcagttgatgatcgaagaaaacgacatcatcagccagcaagtgccagggtttgatgagtggctgtgggtgctggcgtatccggggattaaagtcagcacggcagaagccagggctattttaccggcgcagtatcgccgccaggattgcattgcgcacgggcgacatctggcaggcttcattcacgcctgctattcccgtcagcctgagcttgccgcgaagctgatgaaagatgttatcgctgaaccctaccgtgaacggttactgccaggcttccggcaggcgcggcaggcggtcgcggaaatcggcgcggtagcgagcggtatctccggctccggcccgaccttgttcgctctgtgtgacaagccggaaaccgcccagcgcgttgccgactggttgggtaagaactacctgcaaaatcaggaaggttttgttcatatttgccggctggatacggcgggcgcacgagtactggaaaactaaatgaaactctacaatctgaaagatcacaacgagcaggtcagctttgcgcaagccgtaacccaggggttgggcaaaaatcaggggctgttttttccgcacgacctgccggaattcagcctgactgaaattgatgagatgctgaagctggattttgtcacccgcagtgcgaagatcctcagcgcgtttattggtgatgaaatcccacaggaaatcctggaagagcgcgtgcgcgcggcgtttgccttcccggctccggtcgccaatgttgaaagcgatgtcggttgtctggaattgttccacgggccaacgctggcatttaaagatttcggcggtcgctttatggcacaaatgctgacccatattgcgggtgataagccagtgaccattctgaccgcgacctccggtgataccggagcggcagtggctcatgctttctacggtttaccgaatgtgaaagtggttatcctctatccacgaggcaaaatcagtccactgcaagaaaaactgttctgtacattgggcggcaatatcgaaactgttgccatcgacggcgatttcgatgcctgtcaggcgctggtgaagcaggcgtttgatgatgaagaactgaaagtggcgctagggttaaacagcgctaacagcattaacatcagccgtttgctggcgcagatttgctactactttgaagctgttgcgcagctgccgcaggagacgcgcaaccagctggttgtcagcgtgccaagcggaaacttcggcgatttgacggcgggtctgctggcgaagagtctcggtctgccggtgaaacgttttattgctgcgaccaacgtgaacgataccgtgccacgtttcctgcacgacggtcagtggagtcccaaagcgactcaggcgacgttatccaacgcgatggacgtgagtcagccgaacaactggccgcgtgtggaagagttgttccgccgcaaaatctggcaactgaaagagctgggttatgcagccgtggatgatgaaaccacgcaacagacaatgcgtgagctaaaagaactgggctacactagcgagccgcacgctgccgtagcttatcgtgcgctgcgtgatcagttgaatccaggcgaatatggcttgttcctcggcaccgcgcatccggcgaaatttaaagagagcgtggaagcgattctcggtgaaacgttggatctgccaaaagagctggcagaacgtgctgatttacccttgcttagtcataatctgcccgccgattttgctgcgttgcgtaaattgatgatgaatcatcagtaaaatctattcattatctcaatcaggccgggtttgcttttatgcagcccggcttttttatgaagaaattatggagaaaaatgacagggaaaaaggagaaattctcaataaatgcggtaacttagagattaggattgcggagaataacaaccgccgttctcatcgagtaatctccggatatcgacccataacgggcaatgataaaaggagtaacctgtgaaaaagatgcaatctatcgtactcgcactttccctggttctggtcgctcccatggcagcacaggctgcggaaattacgttagtcccgagtgtaaaattacagataggcgatcgtgataatcgtggctattactgggatggaggtcactggcgcgaccacggctggtggaaacaacattatgaatggcgaggcaatcgctggcacctacacggaccgccgccaccgccgcgccaccataagaaagctcctcatgatcatcacggcggtcatggtccaggcaaacatcaccgctaaatgacaaatgccgggtaacaatccggcattcagcgcctgatgcgacgctggcgcgtcttatcaggcctacgttaattctgcaatatattgaatctgcatgcttttgtaggcaggataaggcgttcacgccgcatccggcattgactgcaaacttaacgctgctcgtagcgtttaaacaccagttcgccattgctggaggaatcttcatcaaagaagtaaccttcgctattaaaaccagtcagttgctctggtttggtcagccgattttcaataatgaaacgactcatcagaccgcgtgctttcttagcgtagaagctgatgatcttaaatttgccgttcttctcatcgaggaacaccggcttgataatctcggcattcaatttcttcggcttcacgcttttaaaatactcatcactcgccagattaatcaccacattatcgccttgtgctgcgagcgcctcgttcagcttgttggtgatgatatctccccagaattgatacagatctttccctcgggcattctcaagacggatccccatttccagacgataaggctgcattaaatcgagcgggcggagtacgccatacaagccggaaagcattcgcaaatgctgttgggcaaaatcgaaatcgtcttcgctgaaggtttcggcctgcaagccggtgtagacatcacctttaaacgccagaatcgcctggcgggcattcgccggcgtgaaatctggctgccagtcatgaaagcgagcggcgttgatacccgccagtttgtcgctgatgcgcatcagcgtgctaatctgcggaggcgtcagtttccgcgcctcatggatcaactgctgggaattgtctaacagctccggcagcgtatagcgcgtggtggtcaacgggctttggtaatcaagcgttttcgcaggactaataagaatcagcatatccagtccttgcaggaaatttatgccgactttagcaaaaaatgagaatgagttgatcgatagttgtgattactcctggctaacatcatcccacgcgtccggagaaagctggcgaccgatatccggataacgcaatggatcaaacaccgggcgcacgccgagtttacgctggcgtagataatcactggcaatggtatgaaccacagggctgagcagtaaaatggcggtcaaattggtaatagccatgcaggccattatgatatctgccagttgccacatcagcggaaggcttagcaaggtgccgccgatgaccgttgcgaaggtgcagatccgcaaacaccagatcgctttagggttgttcaggcgtaaaaagaagagattgttttcggcataaatgtagttggcaacgatggagctgaaggcaaacagaataaccacaagggtaacaaactcagcaccccaggaacccattagcacccgcatcgccttctggataagctgaataccttccagcggcatgtaggttgtgccgttacccgccagtaatatcagcatggcgcttgccgtacagatgaccagggtgtcgataaaaatgccaatcatctggacaatcccttgcgctgccggatgcggaggccaggacgccgctgccgctgccgcgtttggcgtgctacccattcccgcctcattggaaaacatactgcgctgaaaaccgttagtaatcgcctggcttaaggtatatcccgccgcgccgcctgccgcttcctgccagccaaaagcactctcaaaaatagaccaaatgacgtggggaagttgcccgatattcattacgcaaattaccaggctggtcagtacccagattatcgccatcaacgggacaaagccctgcatgagccgggcgacgccatgaagaccgcgagtgattgccagcagagtaaagacagcgagaataatgcctgtcaccagcgggggaaaatcaaaagaaaaactcagggcgcgggcaacggcgttcgcttgaactccgctgaaaattatgccataggcgatgagcaaaaagacggcgaacagaacgcccatccagcgcatccccagcccgcgcgccatataccatgccggtccgccacgaaactgcccattgacgtcacgttctttataaagttgtgccagagaacattcggcaaagctggtcgccatgccgataaacgcggcaacccacatccaaaagacggctccaggtccaccggcggtaatagccagcgcaacgccggccaggttgccgctacccacgcgcgccgcaagactggtacacaaactctgaaaactggttaaaccgcctggctgtggatgaatgctatttttaagacttttgccaaactggcggatgtagcgaaactgcacaaatccggtgcgaaaagtgaaccaacaacctgcgccgaagagcaggtaaatcattacgcttccccaaaggacgctgttaatgaaggagaaaaaatctggcatgcatatccctcttattgccggccgcgatgactttcctgtgtaaacgttaccaattgtttaagaagtatatacgctacgaggtacttgataacttctgcgtagcatacatgaggttttgtataaaaatggcgggcgatatcaacgcagtgtcagaaatccgaaacagtctcgcctggcgataaccgtcttgtcggcggttgcgctgacgttgcgtcgtgatatcatcagggcagaccggttacatccccctaacaagctgtttaaagagaaatactatcatgacggacaaattgacctcccttcgtcagtacaccaccgtagtggccgacactggggacatcgcggcaatgaagctgtatcaaccgcaggatgccacaaccaacccttctctcattcttaacgcagcgcagattccggaataccgtaagttgattgatgatgctgtcgcctgggcgaaacagcagagcaacgatcgcgcgcagcagatcgtggacgcgaccgacaaactggcagtaaatattggtctggaaatcctgaaactggttccgggccgtatcagtactgaagttgatgcgcgtctttcctatgacaccgaagcgagtattgcgaaagcaaaacgcctgatcaaactctacaacgatgctggtattagcaacgatcgtattctgatcaaactggcttctacctggcagggtatccgtgctgcagaacagctggaaaaagaaggcatcaactgtaacctgaccctgctgttctccttcgctcaggctcgtgcttgtgcggaagcgggcgtgttcctgatcagcccgtttgttggccgtattcttgactggtacaaagcgaataccgataagaaagagtacgctccggcagaagatccgggcgtggtttctgtatctgaaatctaccagtactacaaagagcacggttatgaaaccgtggttatgggcgcaagcttccgtaacatcggcgaaattctggaactggcaggctgcgaccgtctgaccatcgcaccggcactgctgaaagagctggcggagagcgaaggggctatcgaacgtaaactgtcttacaccggcgaagtgaaagcgcgtccggcgcgtatcactgagtccgagttcctgtggcagcacaaccaggatccaatggcagtagataaactggcggaaggtatccgtaagtttgctattgaccaggaaaaactggaaaaaatgatcggcgatctgctgtaatcattcttagcgtgaccgggaagtcggtcacgctacctcttctgaagcctgtctgtcactcccttcgcagtgtatcattctgtttaacgagactgtttaaacggaaaaatcttgatgaatactttacgtattggcttagtttccatctctgatcgcgcatccagcggcgtttatcaggataaaggcatccctgcgctggaagaatggctgacaagcgcgctaaccacgccgtttgaactggaaacccgcttaatccccgatgagcaggcgatcatcgagcaaacgttgtgtgagctggtggatgaaatgagttgccatctggtgctcaccacgggcggaactggcccggcgcgtcgtgacgtaacgcccgatgcgacgctggcagtagcggaccgcgagatgcctggctttggtgaacagatgcgccagatcagcctgcattttgtaccaactgcgatccttagccgtcaggtgggcgtgattcgcaaacaggcgctgatccttaacttacccggtcagccgaagtctattaaagagacgctggaaggtgtgaaggacgctgagggtaacgttgtggtacacggtatttttgccagcgtaccgtactgcattcagttgctggaagggccatacgttgaaacggcaccggaagtggttgcagcattcagaccgaagagtgcaagacgcgacgttagcgaataaaaaaatccccccgagcggggggatctcaaaacaattagtgggattcaccaatcggcagaacggtgcgaccaaactgctcgttcagtacttcacccatcgccagatagattgcgctggcaccgcagatcagcccaatccagccggcaaagtggatgattgcggcgttaccggcaatgttaccgatcgccagcagggcaaacagcacggtcaggctaaagaaaacgaattgcagaacgcgtgcgcctttcagcgtgccgaagaacataaacagcgtaaatacgccccacagacccaggtagacaccaaggaactgtgcatttggcgcatcggtcagacccagtttcggcatcagcagaatcgcaaccagcgtcagccagaaagaaccgtaagaggtgaatgcggttaaaccgaaagtgttgccttttttgtactccagcagaccagcaaaaatttgcgcgatgccgccgtagaaaatgcccatggcaagaataatgccgtccagagcgaaataacccacgttgtgcaggttaagcagaatggtggtcatgccgaagcccatcaggcccagcggtgccggattagccaacttagtgttgcccataattcctcaaaaatcatcatcgaatgaatggtgaaataatttccctgaataactgtagtgttttcagggcgcggcataataatcagccagtggggcagtgtctacgatcttttgaggggaaaatgaaaattttccccggtttccggtatcagacctgagtggcgctaaccatccggcgcaggcaggcgatttgcagtacggctggaatcgtcacgcgataggcgctgccgctgaccgctttaaccccatttagtgccgcacctacagggccttccagccccgcgccgcgcagcaaaccatgcccaagtacgctcattgctgcgtgggtgcgtaaaatgcgggtcagttggctggaaagcaaatggctcacaccttttgccaataatttgtctttcatcagcagcggcagcagctcttccagctcattcaccctggcatcgaccgcgtgcagaaactcctgcttatgttcctcgtccattttcttccaggtattacgcagaaattgttccagtaactgttgctcaatttcaaacgtagacatctctttgtcggctttcagcttcaatcgcttactaacatcgagcaaaatggcccgatacaatttaccgtgtccgcgcagtttgttggcgatactatcgccaccaaaatgctgtaattctccggcaatcagctgccagttgcggcgatgttgctcgggatgcccttccatgcttttaaacagttcgttgcgcatcagtacgctggagaggcgagttttgcctttttcattatgggtgagcaatcgggcgaaatttgccaactgttcctcactacaatgctgaagaaaatccagatcactatcattcaggtaattaacattcattttttgtggcttctatattctggcgttagtcgtcgccgataattttcagcgtggccatatcgctactgttcaccgtatgaccgctaaaggtgattttactgacgcagcgtttattgtcgttatcgctgttaatgttgatccagtcagtggtttgcccttcttttatttcactaggaatattcaggctctgactggcgctacgggcggctttgaaataaacgcttgcaccgcttaactgtaaatcgccatggtcggcagagagttgtatgcgtttcacaatgcgacaaacaggaagtttcagcgccagatcgttggtttcgttacgcggcattgcaatggcgccgaggagtttatggtcgtttgcctgcgccgtgcagcacagcatcaggctaatcgccaggctggcggaaatcgtaaaaacggatttcataaggattctcttagtgggaagaggtagggggatgaatacccactagtttactgctgataaagagaagattcaggcacgtaatcttttctttttattacaattttttgatgaatgccttggctgcgattcattctttatatgaataaaattgctgtcaattttacgtcttgtcctgccatatcgcgaaatttctgcgcaaaagcacaaaaaatttttgcatctcccccttgatgacgtggtttacgaccccatttagtagtcaaccgcagtgagtgagtctgcaaaaaaatgaaattgggcagttgaaaccagacgtttcgcccctattacagactcacaaccacatgatgaccgaatatatagtggagacgtttagatgggtaaaataattggtatcgacctgggtactaccaactcttgtgtagcgattatggatggcaccactcctcgcgtgctggagaacgccgaaggcgatcgcaccacgccttctatcattgcctatacccaggatggtgaaactctagttggtcagccggctaaacgtcaggcagtgacgaacccgcaaaacactctgtttgcgattaaacgcctgattggtcgccgcttccaggacgaagaagtacagcgtgatgtttccatcatgccgttcaaaattattgctgctgataacggcgacgcatgggtcgaagttaaaggccagaaaatggcaccgccgcagatttctgctgaagtgctgaaaaaaatgaagaaaaccgctgaagattacctgggtgaaccggtaactgaagctgttatcaccgtaccggcatactttaacgatgctcagcgtcaggcaaccaaagacgcaggccgtatcgctggtctggaagtaaaacgtatcatcaacgaaccgaccgcagctgcgctggcttacggtctggacaaaggcactggcaaccgtactatcgcggtttatgacctgggtggtggtactttcgatatttctattatcgaaatcgacgaagttgacggcgaaaaaaccttcgaagttctggcaaccaacggtgatacccacctggggggtgaagacttcgacagccgtctgatcaactatctggttgaagaattcaagaaagatcagggcattgacctgcgcaacgatccgctggcaatgcagcgcctgaaagaagcggcagaaaaagcgaaaatcgaactgtcttccgctcagcagaccgacgttaacctgccatacatcactgcagacgcgaccggtccgaaacacatgaacatcaaagtgactcgtgcgaaactggaaagcctggttgaagatctggtaaaccgttccattgagccgctgaaagttgcactgcaggacgctggcctgtccgtatctgatatcgacgacgttatcctcgttggtggtcagactcgtatgccaatggttcagaagaaagttgctgagttctttggtaaagagccgcgtaaagacgttaacccggacgaagctgtagcaatcggtgctgctgttcagggtggtgttctgactggtgacgtaaaagacgtactgctgctggacgttaccccgctgtctctgggtatcgaaaccatgggcggtgtgatgacgacgctgatcgcgaaaaacaccactatcccgaccaagcacagccaggtgttctctaccgctgaagacaaccagtctgcggtaaccatccatgtgctgcagggtgaacgtaaacgtgcggctgataacaaatctctgggtcagttcaacctagatggtatcaacccggcaccgcgcggcatgccgcagatcgaagttaccttcgatatcgatgctgacggtatcctgcacgtttccgcgaaagataaaaacagcggtaaagagcagaagatcaccatcaaggcttcttctggtctgaacgaagatgaaatccagaaaatggtacgcgacgcagaagctaacgccgaagctgaccgtaagtttgaagagctggtacagactcgcaaccagggcgaccatctgctgcacagcacccgtaagcaggttgaagaagcaggcgacaaactgccggctgacgacaaaactgctatcgagtctgcgctgactgcactggaaactgctctgaaaggtgaagacaaagccgctatcgaagcgaaaatgcaggaactggcacaggtttcccagaaactgatggaaatcgcccagcagcaacatgcccagcagcagactgccggtgctgatgcttctgcaaacaacgcgaaagatgacgatgttgtcgacgctgaatttgaagaagtcaaagacaaaaaataatcgccctataaacgggtaattatactgacacgggcgaaggggaatttcctctccgcccgtgcattcatctaggggcaatttaaaaaagatggctaagcaagattattacgagattttaggcgtttccaaaacagcggaagagcgtgaaatcagaaaggcctacaaacgcctggccatgaaataccacccggaccgtaaccagggtgacaaagaggccgaggcgaaatttaaagagatcaaggaagcttatgaagttctgaccgacagccaaaaacgtgcggcatacgatcagtatggtcatgctgcgtttgagcaaggtggcatgggcggcggcggttttggcggcggcgcagacttcagcgatatttttggtgacgttttcggcgatatttttggcggcggacgtggtcgtcaacgtgcggcgcgcggtgctgatttacgctataacatggagctcaccctcgaagaagctgtacgtggcgtgaccaaagagatccgcattccgactctggaagagtgtgacgtttgccacggtagcggtgcaaaaccaggtacacagccgcagacttgtccgacctgtcatggttctggtcaggtgcagatgcgccagggattcttcgctgtacagcagacctgtccacactgtcagggccgcggtacgctgatcaaagatccgtgcaacaaatgtcatggtcatggtcgtgttgagcgcagcaaaacgctgtccgttaaaatcccggcaggggtggacactggagaccgcatccgtcttgcgggcgaaggtgaagcgggcgagcatggcgcaccggcaggcgatctgtacgttcaggttcaggttaaacagcacccgattttcgagcgtgaaggcaacaacctgtattgcgaagtcccgatcaacttcgctatggcggcgctgggtggcgaaatcgaagtaccgacccttgatggtcgcgtcaaactgaaagtgcctggcgaaacccagaccggtaagctattccgtatgcgcggtaaaggcgtcaagtctgtccgcggtggcgcacagggtgatttgctgtgccgcgttgtcgtcgaaacaccggtaggcctgaacgaaaggcagaaacagctgctgcaagagctgcaagaaagcttcggtggcccaaccggcgagcacaacagcccgcgcagtaagagcttctttgatggtgtgaagaagttttttgacgacctgacccgctaacctccccaaaagcctgcccgtgggcaggcctgggtaaaaatagggtgcgttgaagatatgcgagcacctgtaaagtggcggggatcactctacctcaatgtgtatcacaatatccatattctttgtgggggagtctggagattgagtagatattcttgttcagaatgtatcagccgatggttctacgattcttaagccacgaagagttcagatagtacaacggcatgtctcttttgactatctggcaaccggcagtgtgttctctcacgcatcacaaaagcagcaggcataaaaaaacccgcttgcgcgggctttttcacaaagcttcagcaaattggcgattaagccagtttgttgatctgtgcagtcaggttagccttatgacgtgcagctttgtttttgtggatcagacctttagcagcctgacggtccacgatcggttgcatttcgttaaatgctttctgtgcagcagctttgtcgccagcttcgatagctgcgtatactttcttgatgaaagtacgcatcatagagcgacggcttgcgttgtgcttacgagccttttcagactgaatggcgcgcttcttagcacttttgatattagccaaggtccaactcccaaatgtgttctatatggacaattcaaaggccgaggaatatgcccttttagccttcttttgtcaatggatttgtgcaaataagcgccgttaatgtgccggcacagcttacgtagtgatggcgcaggattctaccagcttgcggggtgtgaatacagcttttccgcgataaaaattgcagcaggcggtcagtttcttcccgtgatttgcgccatggcaatgaaaagccacttctttctgattagcgtactcaatcgccggttaaccttgaccgctgtacaaggtatactcggacgatttagcctgttttgagccagacatgaagctgatacgcggcatacataatctcagccaggccccgcaagaagggtgtgtgctgactattggtaatttcgacggcgtgcatcgcggtcatcgcgcgctgttacagggcttgcaggaagaagggcgcaagcgcaacttaccggtgatggtgatgctttttgaacctcaaccactggaactgtttgctaccgataaagccccggcaagactgacccggctgcgggaaaaactgcgttaccttgcagagtgtggcgttgattacgtgctgtgcgtgcgtttcgacaggcgtttcgcggcgttaaccgcgcaaaatttcatcagcgatcttctggtgaagcatttgcgcgtaaaatttcttgccgtaggtgatgatttccgctttggcgctggtcgtgaaggcgatttcttgttattacagaaagctggcatggaatacggcttcgatatcaccagtacgcaaactttttgcgaaggtggcgtgcgcatcagcagcaccgccgtgcgtcaggcccttgcggatgacaatctggctctggcagagagtttactggggcacccgtttgccatctccgggcgtgtagtccacggtgatgaattagggcgcactataggtttcccgacggcgaatgtaccgctgcgccgtcaggtttccccggtgaaaggggtttatgcggtagaagtgctgggcctcggtgaaaagccgttacccggcgtggcaaacatcggaacacgcccaacggttgccggtattcgccagcagctggaagtgcatttgttagatgttgcaatggacctttacggtcgccatatacaagtagtgctgcgtaaaaaaatacgcaatgagcagcgatttgcgagcctggacgaactgaaagcgcagattgcgcgtgatgaattaaccgcccgcgaattttttgggctaacaaaaccggcttaagcctgttatgtaatcaaaccgaaatacggaaccgagaatctgatgagtgactataaaagtaccctgaatttgccggaaacagggttcccgatgcgtggcgatctcgccaagcgcgaacccggaatgctggcgcgttggactgatgatgatctgtacggcatcatccgtgcggctaaaaaaggcaaaaaaaccttcattctgcatgatggccctccttatgcgaatggcagcattcatattggtcacagcgttaacaagattctgaaagacattatcgtgaagtccaaagggctttccggttatgacagcccgtatgtgcctggctgggactgccacggtctgccgatcgagctgaaagtcgagcaagaatacggtaagccgggtgagaaattcaccgccgccgagttccgcgccaagtgccgcgaatacgcggcgacccaggttgacggtcaacgcaaagactttatccgtctgggcgtgctgggcgactggagccacccgtacctgaccatggacttcaaaactgaagccaacatcatccgcgcgctgggcaaaatcatcggcaacggtcacctgcacaaaggcgcgaagccagttcactggtgcgttgactgccgttctgcgctggcggaagcggaagttgagtattacgacaaaacttctccgtccatcgacgttgctttccaggcagtcgatcaggatgcactgaaagcaaaatttgccgtaagcaacgttaacggcccaatcagcctggtaatctggaccaccacgccgtggactctgcctgccaaccgcgcaatctctattgcaccagatttcgactatgcgctggtgcagatcgacggtcaggccgtgattctggcgaaagatctggttgaaagcgtaatgcagcgtatcggcgtgaccgattacaccattctcggcacggtaaaaggtgcggagcttgagctgctgcgctttacccatccgtttatgggcttcgacgttccggcaatcctcggcgatcacgttaccctggatgccggtaccggtgccgttcacaccgcgcctggccacggcccggacgactatgtgatcggtcagaaatacggcctggaaaccgctaacccggttggcccggacggcacttatctgccgggcacttatccgacgctggatggcgtgaacgtcttcaaagcgaacgacatcgtcgttgcgctgctgcaggaaaaaggcgcgctgctgcacgttgagaaaatgcagcacagctatccgtgctgctggcgtcacaaaacgccgatcatcttccgcgcgacgccgcagtggttcgtcagcatggatcagaaaggtctgcgtgcgcagagtctgaaagagatcaaaggcgtgcagtggatcccggactggggccaggcgcgtatcgagagcatggttgctaaccgtcctgactggtgtatctcccgtcagcgcacctggggtgtaccgatgagtctgttcgtgcacaaagacacggaagagctgcatccgcgtacccttgaactgatggaagaagtggcaaaacgcgttgaagtcgatggcatccaggcgtggtgggatctcgatgcgaaagagatcctcggcgacgaagctgatcagtacgtgaaagtgccggacacattggatgtatggtttgactccggatctacccactcttctgttgttgacgtgcgtccggaatttgccggtcacgcagcggacatgtatctggaaggttctgaccaacaccgcggctggttcatgtcttccctaatgatctccaccgcgatgaagggtaaagcgccgtatcgtcaggtactgacccacggctttaccgtggatggtcagggccgcaagatgtctaaatccatcggcaataccgttagcccgcaggatgtgatgaacaaactgggcgcggatattctgcgtctgtgggtggcaagtaccgactacaccggtgaaatggccgtttctgacgagatcctgaaacgtgctgccgatagctatcgtcgtatccgtaacaccgcgcgcttcctgctggcaaacctgaacggttttgatccagcaaaagatatggtgaaaccggaagagatggtggtactggatcgctgggccgtaggttgtgcgaaagcggcacaggaagacatcctcaaggcgtacgaagcatacgatttccacgaagtggtacagcgtctgatgcgcttctgctccgttgagatgggttccttctacctcgacatcatcaaagaccgtcagtacaccgccaaagcggacagtgtggcgcgtcgtagctgccagactgcgctatatcacatcgcagaagcgctggtgcgctggatggcaccaatcctctccttcaccgctgatgaagtgtggggctacctgccgggcgaacgtgaaaaatacgtcttcaccggtgagtggtacgaaggcctgtttggcctggcagacagtgaagcgatgaacgatgcgttctgggacgagctgttgaaagtgcgtggcgaagtgaacaaagtcattgagcaagcgcgtgccgacaagaaagtgggtggcagcctggaagcggcagtaaccttgtatgcagaaccggaactgagcgcgaaactgaccgcgctgggcgatgaattacgatttgtcctgttgacctccggcgctaccgttgcagactataacgacgcacctgctgatgctcagcagagcgaagtactcaaagggctgaaagtcgcgttgagtaaagccgaaggtgagaagtgcccacgctgctggcactacacccaggatgtcggcaaggtggcggaacacgcagaaatctgcggccgctgtgtcagcaacgtcgccggtgacggtgaaaaacgtaagtttgcctgatgagtcaaagcatctgtagtacagggctacgctggctgtggctggtggtagtcgtgctgattatcgatctgggcagcaaatacctgatcctccagaactttgctctgggggatacggtcccgctgttcccgagccttaatctgcattatgcgcgtaactatggcgcggcgtttagtttccttgccgatagcggcggctggcagcgttggttctttgccggtattgcgattggtattagcgtgatcctggcagtgatgatgtatcgcagcaaggccacgcagaagctaaacaatatcgcttacgcgctgattattggcggcgcgctgggcaacctgttcgaccgcctgtggcacggcttcgttgtcgatatgatcgacttctacgtcggcgactggcacttcgccaccttcaaccttgccgatactgccatctgtgtcggtgcggcactgattgtgctggaaggttttttgccttctagagcgaaaaaacaataataaaccctgccggatgcgatgctgacgcatcttatccggcctacagattgctgcgaaatcgtaggccggataaggcgtttacgccgcatccggcaaaaatccttaaatataagagcaaacctgcatgtctgaatctgtacagagcaatagcgccgtcctggtgcacttcacgctaaaactcgacgatggcaccaccgccgagtctacccgcaacaacggtaaaccggcgctgttccgcctgggtgatgcttctctttctgaagggctggagcaacacctgttggggctgaaagtgggcgataaaaccaccttcagcttggagccagatgcggcgtttggcgtgccgagtccggacctgattcagtacttctcccgccgtgaatttatggatgcaggcgagccagaaattggcgcaatcatgctttttaccgcaatggatggcagtgagatgcctggcgtgatccgcgaaattaacggcgactccattaccgttgatttcaaccatccgctggccgggcagaccgttcattttgatattgaagtgctggaaatcgatccggcactggaggcgtaacatgcagatcctgttggccaacccgcgtggtttttgtgccggggtagaccgcgctatcagcattgttgaaaacgcgctggccatttacggcgcaccgatatatgtccgtcacgaagtggtacataaccgctatgtggtcgatagcttgcgtgagcgtggggctatctttattgagcagattagcgaagtaccggacggcgcgatcctgattttctccgcacacggtgtttctcaggcggtacgtaacgaagcaaaaagtcgcgatttgacggtgtttgatgccacctgtccgctggtgaccaaagtgcatatggaagtcgcccgcgccagtcgccgtggcgaagaatctattctcatcggtcacgccgggcacccggaagtggaagggacaatgggccagtacagtaacccggaagggggaatgtatctggtcgaaagcccggacgatgtgtggaaactgacggtcaaaaacgaagagaagctctcctttatgacccagaccacgctgagcgtggatgacacgtctgatgtgatcgacgcgctgcgtaaacgcttcccgaaaattgtcggtccgcgcaaagatgacatctgctacgccacgactaaccgtcaggaagcggtacgcgccctggcagaacaggcggaagttgtgttggtggtcggtagcaaaaactcctccaactccaaccgtctggcggagctggcccagcgtatgggcaaacgcgcgtttttgattgacgatgcgaaagacatccaggaagagtgggtgaaagaggttaaatgcgtcggcgtgactgcgggcgcaagcgctccggatattctggtgcagaatgtggtggcgcgtttgcagcagctgggcggtggtgaagccattccgctggaaggccgtgaagaaaacattgttttcgaagtgccgaaagagctgcgtgtcgatattcgtgaagtcgattaagtcattagcagcctaagttatgcgaaaatgccggtcttgttaccggcattttttatggagaaaacatgcgtttacctatcttcctcgatactgaccccggcattgacgatgccgtcgccattgccgccgcgatttttgcacccgaactcgacctgcaactgatgaccaccgtcgcgggtaatgtcagcgttgagaaaactacccgcaatgccctgcaactgctgcatttctggaatgcggagattccgctcgcccaaggggccgctgtgccactggtacgcgcaccgcgtgatgcggcatctgtgcacggcgaaagcggaatggctggctacgactttgttgagcacaaccgaaagccgctcgggataccggcgtttctggcgattcgggatgccctgatgcgtgcaccagagcctgttaccctggtggccatcggcccgttaaccaatattgcgctgttacttagtcaatgcccggaatgcaagccgtatattcgccgtctggtgatcatgggtggttctgccggacgcggcaactgtacgccaaacgccgagtttaatattgctgccgatccagaagctgctgcctgtgtcttccgcagtggtattgaaatcgtcatgtgcggtttggatgtcaccaatcaggcaatattaactcctgactatctctctacactgccgcagttaaaccgtaccgggaaaatgcttcacgccctgtttagccactaccgtagcggcagtatgcaaagcggcttgcgaatgcacgatctctgcgccatcgcctggctggtgcgcccggacctgttcactctcaaaccctgttttgtggcagtggaaactcagggcgaatttaccagtggcacgacggtggttgatatcgacggttgcctgggcaagccagccaatgtacaggtggcattggatctggatgtgaaaggcttccagcagtgggtggctgaggtgctggctctggcgagctaacctgtcacatgttattggcatgcagtcattcatcgactcatgcctttcactgatatccctccctgtttatcattaatttctaattatcagcgtttttggctggcggcgtagcgatgcgctggttactctgaaaacggtctatgcaaattaacaaaagagaatagctatgcatgatgcaaacatccgcgttgccatcgcgggagccggggggcgtatgggccgccagttgattcaggcggcgctggcattagagggcgtgcagttgggcgctgcgctggagcgtgaaggatcttctttactgggcagcgacgccggtgagctggccggagccgggaaaacaggcgttaccgtgcaaagcagcctcgatgcggtaaaagatgattttgatgtgtttatcgattttacccgtccggaaggtacgctgaaccatctcgctttttgtcgccagcatggcaaagggatggtgatcggcactacggggtttgacgaagccggtaaacaagcaattcgtgacgccgctgccgatattgcgattgtctttgctgccaattttagcgttggcgttaacgtcatgcttaagctgctggagaaagcagccaaagtgatgggtgactacaccgatatcgaaattattgaagcacatcatagacataaagttgatgcgccgagtggcaccgcactggcaatgggagaggcgatcgcccacgcccttgataaagatctgaaagattgcgcggtctacagtcgtgaaggccacaccggtgaacgtgtgcctggcaccattggttttgccaccgtgcgtgcaggtgacatcgttggtgaacataccgcgatgtttgccgatattggcgagcgtctggagatcacccataaggcgtccagccgtatgacatttgctaacggcgcggtaagaagcgctttgtggttgagtggtaaggaaagcggtctttttgatatgcgagatgtacttgatctcaataatttgtaaccacaaaatatttgttatggtgcaaaaataacacatttaatttattgattataaagggctttaatttttggcccttttatttttggtgttatgtttttaaattgtctataagtgccaaaaattacatgttttgtcttctgtttttgttgttttaatgtaaattttgaccatttggtccacttttttctgctcgtttttatttcatgcaatcttcttgctgcgcaagcgttttccagaacaggttagatgatctttttgtcgcttaatgcctgtaaaacatgcatgagccacaaaataatataaaaaatcccgccattaagttgacttttagcgcccatatctccagaatgccgccgtttgccagaaattcgtcggtaagcagatttgcattgatttacgtcatcattgtgaattaatatgcaaataaagtgagtgaatattctctggagggtgttttgattaagagtgcgctattggttctggaagacggaacccagtttcacggtcgggccataggggcaacaggtagcgcggttggggaagtcgttttcaatactagtatgaccggttatcaagaaatcctcactgatccttcctattctcgtcaaatcgttactcttacttatccccatattggcaatgtcggcaccaatgacgccgatgaagaatcttctcaggtacatgcacaaggtctggtgattcgcgacctgccgctgattgccagcaacttccgtaataccgaagacctctcttcttacctgaaacgccataacatcgtggcgattgccgatatcgatacccgtaagctgacgcgtttactgcgcgagaaaggcgcacagaatggctgcattatcgcgggcgataacccggatgcggcgctggcgttagaaaaagcccgcgcgttcccaggtctgaatggcatggatctggcaaaagaagtgaccaccgcagaagcctatagctggacacaagggagctggacgttgaccggtggcctgccagaagcgaaaaaagaagacgagctgccgttccacgtcgtggcttatgattttggtgccaagcgcaacatcctgcggatgctggtggatagaggctgtcgcctgaccatcgttccggcgcaaacttctgcggaagatgtgctgaaaatgaatccagacggcatcttcctctccaacggtcctggcgacccggccccgtgcgattacgccattaccgccatccagaaattcctcgaaaccgatattccggtattcggcatctgtctcggtcatcagctgctggcgctggcgagcggtgcgaagactgtcaaaatgaaatttggtcaccacggcggcaaccatccggttaaagatgtggagaaaaacgtggtaatgatcaccgcccagaaccacggttttgcggtggacgaagcaacattacctgcaaacctgcgtgtcacgcataaatccctgttcgacggtacgttacagggcattcatcgcaccgataaaccggcattcagcttccaggggcaccctgaagccagccctggtccacacgacgccgcgccgttgttcgaccactttatcgagttaattgagcagtaccgtaaaaccgctaagtaatcaggagtaaaagagccatgccaaaacgtacagatataaaaagtatcctgattctgggtgcgggcccgattgttatcggtcaggcgtgtgagtttgactactctggcgcgcaagcgtgtaaagccctgcgtgaagagggttaccgcgtcattctggtgaactccaacccggcgaccatcatgaccgacccggaaatggctgatgcaacctacatcgagccgattcactgggaagttgtacgcaagattattgaaaaagagcgcccggacgcggtgctgccaacgatgggcggtcagacggcgctgaactgcgcgctggagctggaacgtcagggcgtgttggaagagttcggtgtcaccatgattggtgccactgccgatgcgattgataaagcagaagaccgccgtcgtttcgacgtagcgatgaagaaaattggtctggaaaccgcgcgttccggtatcgcacacacgatggaagaagcgctggcggttgccgctgacgtgggcttcccgtgcattattcgcccatcctttaccatgggcggtagcggcggcggtatcgcttataaccgtgaagagtttgaagaaatttgcgcccgcggtctggatctctctccgaccaaagagttgctgattgatgagagcctgatcggctggaaagagtacgagatggaagtggtgcgtgataaaaacgacaactgcatcatcgtctgctctatcgaaaacttcgatgcgatgggcatccacaccggtgactccatcactgtcgcgccagcccaaacgctgaccgacaaagaatatcaaatcatgcgtaacgccagcatggcggtgctgcgtgaaatcggcgttgaaaccggtggttccaacgttcagtttgcggtgaacccgaaaaacggtcgtctgattgttatcgaaatgaacccacgcgtgtcccgttctagcgcgctggcgagcaaagcgaccggtttcccgattgctaaagtggcggcgaaactggcggtgggttacaccctcgacgaactgatgaacgacatcactggcggacgtactccggcctccttcgagccgtccatcgactatgtggttactaaaattcctcgcttcaacttcgaaaaattcgccggtgctaacgaccgtctgaccactcagatgaaaagcgttggcgaagtgatggcgattggtcgcacgcagcaggaatccctgcaaaaagcgctgcgcggcctggaagtcggtgcgactggattcgacccgaaagtgagcctggatgacccggaagcgttaaccaaaatccgtcgcgaactgaaagacgcaggcgcagatcgtatctggtacatcgccgatgcgttccgtgcgggcctgtctgtggacggcgtcttcaacctgaccaacattgaccgctggttcctggtacagattgaagagctggtgcgtctggaagagaaagtggcggaagtgggcatcactggcctgaacgctgacttcctgcgccagctgaaacgcaaaggctttgccgatgcgcgcttggcaaaactggcgggcgtacgcgaagcggaaatccgtaagctgcgtgaccagtatgacctgcacccggtttataagcgcgtggatacctgtgcggcagagttcgccaccgacaccgcttacatgtactccacttatgaagaagagtgcgaagcgaatccgtctaccgaccgtgaaaaaatcatggtgcttggcggcggcccgaaccgtatcggtcagggtatcgaattcgactactgttgcgtacacgccagcctggcgctgcgcgaagacggttacgaaaccattatggttaactgtaacccggaaaccgtctccaccgactacgacacttccgaccgcctctacttcgagccggtaactctggaagatgtgctggaaatcgtgcgtatcgagaagccgaaaggcgttatcgtccagtacggcggtcagaccccgctgaaactggcgcgcgcgctggaagctgctggcgtaccggttatcggcaccagcccggatgctatcgaccgtgcagaagaccgtgaacgcttccagcatgcggttgagcgtctgaaactgaaacaaccggcgaacgccaccgttaccgctattgaaatggcggtagagaaggcgaaagagattggctacccgctggtggtacgtccgtcttacgttctcggcggtcgggcgatggaaatcgtctatgacgaagctgacctgcgtcgctacttccagacggcggtcagcgtgtctaacgatgcgccagtgttgctggaccacttcctcgatgacgcggtagaagttgacgtggatgccatctgcgacggcgaaatggtgctgattggcggcatcatggaacatattgagcaggcgggcgtgcactccggtgactccgcatgttctctgccagcctacaccttaagtcaggaaattcaggatgtgatgcgccagcaggtgcagaaactggccttcgaattgcaggtgcgcggcctgatgaacgtgcagtttgcggtgaaaaacaacgaagtctacctgattgaagttaacccgcgtgcggcgcgtaccgttccgttcgtctccaaagccaccggcgtaccgctggcaaaagtggcggcgcgcgtgatggctggcaaaagcctggctgagcagggcgtaaccaaagaagttatcccgccgtactacagcgtgaaagaagtggtgctgccgttcaataaattcccgggcgttgacccgctgttagggccagaaatgcgctctaccggggaagtcatgggcgtgggccgcaccttcgctgaagcgtttgccaaagcgcagctgggcagcaactccaccatgaagaaacacggtcgtgcgctgctttccgtgcgcgaaggcgataaagaacgcgtggtggacctggcggcaaaactgctgaaacagggcttcgagctggatgcgacccacggcacggcgattgtgctgggcgaagcaggtatcaacccgcgtctggtaaacaaggtgcatgaaggccgtccgcacattcaggaccgtatcaagaatggcgaatatacctacatcatcaacaccaccagtggccgtcgtgcgattgaagactcccgcgtgattcgtcgcagtgcgctgcaatataaagtgcattacgacaccaccctgaacggcggctttgccaccgcgatggcgctgaatgccgatgcgactgaaaaagtaattagcgtgcaggaaatgcacgcacagatcaaataatagcgtgtcatggcagatatttttcatccgctaatttgatcgaataactaatacggttctctgatgaggaccgtttttttttgcccattaagtaaatcttttggggaatcgatatttttgatgacataagcaggatttagctcacacttatcgacggtgaagttgcatactatcgatatatccacaattttaatatggccttgtttaattgcttcaaaacgagtcatagccagacttttaatttgtgaaactggagttcgtatgtgtgaaggatatgttgaaaaaccactctacttgttaatcgccgaatggatgatggctgaaaatcggtgggtgatagcaagagagatctctattcatttcgatattgaacacagcaaggcggttaataccctgacttatattctgagcgaagtcacagaaataagctgcgaagttaagatgatccctaataagctggaagggcggggatgccagtgtcagcgactggttaaagtggtcgatatcgatgagcaaatttacgcgcgcctgcgcaataacagtcgggaaaaattagtcggtgtaagaaagacgccgcgtattcctgccgttccgctcacggaacttaaccgcgagcagaagtggcagatgatgttgagtaagagtatgcgtcgttaattttatctcgttgataccgggcgtcctgcttgccagatgcgatgttgtagcatcttatccagcaaccaggtcgcatccggcaagatcaccgtttaggcgtcacatccgtcgtcccctgcaaacgggggcgattttcctccatttgcctcagtggctgcgtttcatgtaagcttacatgacagcgcccgacaagatcctgatactctttggtattcaaccgtttccagtgtaactcgtcgtcactaacattgcgtacagcgcgggctggcgtacccatcaacaactggcgtttctcgccgcgaaagcccgctttgacaaagctcatggcggcaacaatgctctcttcgccaatgaccgcgccatccataatcacgctgttcatcccgaccaatgcatcgcgaccaatcaaacaaccatgcaggatcgctccgtgcccgatatggccgttttccccaacgatagtgtcagtgtcgcagtagccatgcataatgcagccatcctgaatattggctcccgcttgcacgatcaaccgcccgtagtcaccacgcagactggcgagtgggccgatgtagacaccggctcccacaatcacatcgccaatcaagacggcactgggatggacaaacgccgtcgggtgaaccaccggaattaacccctcaaaggcgtaatagctcacggttgttaacgtcctttccacaccggatcgcgcttctcggcaaacgccagcggcccttcaatggcatcttcgctatgcagaacgcttggatagtgtttcaacacgccgctgcgaatatagcgatacgcttcttctaccggcatttcgctggtggtgcggtagatctctttcagcgccgcaatcgccagcggggcgctgttaaccagctgctgagccagttcgcgggcgttatccatcagttccgcctggctaaccacgcggttgactatcccccaacgcagcgcctcttctgcgcccattcgtctgccggtcatcaccatttcattgacgatggcaggcggcaggatcttcggcagacgcagcacaccgccgctgtcaggaacgatgcccagtttggcttccggcagggcgaagctggcgttatcggcacaaacaataaaatctgccgccagcgccagttcaaagccgccgccaaaggcatagccgttcacagctgcgataaccggtttgtcgagattgaaaatttcggttaatcccgcaaaaccacccggaccaaagtcagcatccggtgcttcgccttctgctgccgcttttaaatcccagcccgcggaaaagaacttctctccggcaccggtaataatggcgacacgtaattgcggatcgtcacggaaatttagaaatacttcgcccatttcaaagctggtttttgcatcaatagcattcgcttttggacgatcaagggtaatttccagaatacttccattgcgggtcagatgtaaactttcactcattccttttctccatttttgctttttcagggagctcaacatccctgcaaaaaatgcatattgttttagagtgtgattattagctggcagggtagttccctgctgtttcatttatttcagattctttctaattattttcccgctgcaattacgtggcagatcttttctgatctccagataagagggcactttaaatttcgccatattttgttcgcagaagcggaaaaattcctcttcgctcaatgtttcaccttcattcagcaccacaaatgctttgatggcttcatcgcgaatgctatctttaatacccacaaccacgatgtcctgaattttcgggtgcgcggcgataatattttccagctccacgcaggagacattctcgccgccacgtttaatcatattgcagcggcgatcgacgaaataaaaaaagtcctcttcgtcgcggtatccggtatcgccggtatgcagccagccatcggcttccagcactttcgcagtggcttgtgggttgagaaagtactctttgaagatggttttcccaggtatgcctttaatgcagatttcaccgatctcaccagccgggagcgggcgattgtgatcgtcgcggatctccgcttcgtagcaaaaccccacccgaccaatgctcggccagcgtcgtttatcgccaggacgatcgccgataatgcccacaatggtttccgtcatcccataagacgtcagcaagcgaacgccgaagcgttcacaaaacgcatctttttcctgctcgctcaagttgagataaaacatcacttcccgcaggcggtgttgctgatcgttcgcactaggcggctgtaccatcaacgtacggatcatcatcggaatacattcggtaacggtggcgcggtacttctgtacctgtccccagaaggcgcgggcgctgtatttctcgaccagcacaaaggtggccccggcagaaaacgccgccatcgccgcagtacactggcaatcgatatgaaacgcaggcattaccgtcaggtagacgtcatcgtcacgcagtgcacactgccaggcggagtaatatccagcgaagcgcaggttgtaatgggtaatcaccacacctttcggtcgggaggtggtgccggaggtgaagagaatttccgccgtatcgtcagtgcttagcggcggtgcatagcacaaggtggcaggttgttgatttttcagttgagtaaagctactcacgccatcatcagcgggaagtgccacatctgtcaggcaaatgtgccgcaattgagtggcatcttcctgctgaatctgttgatacataggatagaattgcgcactggtcaccagcaggcacgcctggctattttgcaggatccacgcgctttccttgcacaacaggcgggcgttaatcggcaccataatcgcgccaatttttgccagcccgaaccagcaaaagataaattccgggcagttgtcgagatgtagtgcaaccttgtcgcctttgcgaatccccagcgtataaaacaggtttgccgtgcggttaatctcctgatttaactcaagataactataccggttaacgactccgccgctggattcacaaatcagcgccgttttatgaccgtaaacgtccgcaagatcgtcccacatttgacgtagatgttgtccgccaatgatatccattgcacctctatccatttttgttcgtttgttattgggcgggcgctagtcaggcaagccgactgacgccacgcgtttagtcctcaactttggccagacctttgctgaccaactcctgaatgtcgttttcgctgtagccgatatttttcaaaatggcagccgtgtccataccatgactgggcattccgcgccagatttgtccggggttatttttgaatttcggcatgatgttcggccctttgcaggtgcgaccatccatcgtttgccactgagtgatactttcgcgagccacatactgtggattgctttccagttccggtacggtcagcactttggcgcaggcgatattcagttcagcaaagcgttcttttacttccgcgatggtatgtgtcgccagccaggcatcgagtttctcttcaaccagtgggccgtaagggcattcgatacggtggataagctgagtgccttccgggatttctggcgtgccaagcagatgtgcgaggccaatatctttaaagcactcttcaatttgggtaatgcccaccagttccatcacgatgtagccgtcggcacatttatacagaccgcaaccggcgtagtagggatctttacctttgctcatgcgcgggcacatttcgccgccgttgaagtaatccatcatgaagtactggcccatacgcagcatcacttcatacatggcgatgtcgatactttcgcctttaccggtttcacgcactttatgcagtgctgccagcgccgccgtggtggcggtcaggccagaaaagtaatcggcggtatacgggaaggcaggcattggctggtcaacatcaccgttctgaatcaggtaaccactaaaggcctgggcgatagtgttataggccggaagattggtgtactcctcggtgccgtactgaccaaaaccggacaggtgagcgataaccagtttcgggttgtgctgccacagtacttcatcggtaatgccacgacgggcaaaggccggacctttactggcttcgatgaagatatcggtggtttccattaatttcagaaacgcttcgcggccttcatctttgaaaatatttaagctcagcgcgtgcaaattgcggcgggagagttgcgggtagttcggttgaacgcgaatggtgtcggcccaggcgacgttctcgatccagataacttccgcgccccattctgcgaacatttgcccggcaaacggtccggcgatttcgataccggagaagacaacgcgcaatccggccaacggcccgaatttcggcatgggtagatgatccattatttgctcctgaaaaatttatgtagcgcatgactgccggatgcggcgtaaacgctttatccggcctacattcgtgctcccgtaggcctgataagacgcatcagcgtcgcatcaggcagcgcacggacttagcggtattgcttcagcaccgcacgacccagcgtcaggatctgcatttcgtcagatcccccggagacgcggtctacacgcagatcacgccagaagcggctgatgcggtggttgcccgcaatcccgacaccgcccagcacctgcattgcgctatccacaacttcaaatgccgcattggcgcagaagtatttgcacatcgctgcatcgccagaggtgatggtgccgttgtctgctttccacgctgcttcatacagcatgtttttcatggagtttaatttgatcgccatgtgggcgaatttttcctgaatcaactggaaacgaccaatagcctcgccaaactgcacgcgctgattggcgtagcgcgccgcatcttcaaaggcgcacatcgccgtaccgtagttggtgagggctaccaggaaacgttcatggtcgaactcttctttgacgcggttaaagccgttaccttcccgaccgaacatgtctttctcgtccagttccacgtcgtcaaaggtgatttcacagcagctatccatacgcagaccgagcttttcaagtttggtcactttgatgcccggtttgctcatatcaacaaaccattcggtgtagacaggtttgtccggagaagccccgtcgcgcgccatcaccacgatgtacggggtgtaggcgctgctggtaataaaacacttactaccattaagataaatcttaccatttctacgggtataagtcgttttcaggctacccacgtcggagcccgcgcccggttcggtaatcgcactgttccacatctgcttaccggtgccgcggaaagccataattttgtcgatctgctcttgtgtgccttcgcgcaggaaggtgttgaacccgcccggcaactggtacagcacataggttggtgcccccagacgtcccagctccatccacacggcggcgagagtaacaaaccccgcgtccagaccaccgtgctcttcagggatcagcagactgtcgatacccatatccgccagtgctttgacaaaacgttccgggtagacgctgtcacggtcgcactcggcaaaataggcctcccagttttcgctggccatcagttcgcggataccggcgacaaacagttcctgctcatcatttaaattaaaatccatctttcaacctcttgatattttgggggttaattaatctttccagttctgtttcgcgtctttaataaaggagagcgtcaccataatgttgacgaagaacagcgggcatcctccggcgataatggcggtttgaatcggtttcaggccgccgagcgccagcagaacaataccgataatgccaaccagaatactccaaccgatacgcaccagcagaggtggttcttcaccatcgcgtacttcgcggcaagtggacatcgccagggtataagagcaggcgttaaccagcgtaacggtggcaataaagcagaggatgaagaagccccacatggtggcggtgctgagtggcagagcggcccaggtttcaatgatggcgcgcgccacaccgtactgttcgatcagatttggaatgttgatgatgtttttatctatcaacagcagagtgttactaccgagtacagtccacaggatccaggtactcgctgtcagccccagcaccatgccgaagcacagttcacgcacagtacgaccacgggagatgcgggcgaggaagatactcatctggatagcataaatcacccaccatgcccagtagaacacggtccagccctgcgggaagccgcctttagcgatgggatcggtatagaacaacatgcgcggcagatacatcagcaacatccccacgctatcggtgaagtagttcatgatgaagctggcaccgctgacaatgaacacccaacccagcatcaggaagctcaggtaactacgcacgtcactggcgatacgtacccctttttgcagaccgcaagcgacgcaaatggcgttgaggataatccagcaggtaatgatgatagcgtccagttgcagggtatgcggaatgccaaacaaccattgcatacactcggtcaccagcggcgtggcaaggcccagactggtacccatcgcgaagatcaaggcgacgagatagaagttgtcgacgatagtgccgaacaaccctttggcgtgtttttcacctaccagcggcaccagtgtgctgctggggcgaatcacttccattttgcggacaaagaagaagtaagcgaaggcgacactaaggaagctgtaagtggcccacggcagaggtccccagtggaacaagctgtaagccagccccaactctttcgcccctgtgctgttcggttctaagccaaacggcggggtggagatgtagtagtagatctcaatgcttccccagaacagtacggcagcagacgtacaggaggcgaacatcataaagatccaactggcggtgctaaattctggcggttcgttacctaaacgctttttggcatacgggccaaacaccagccagaaccaaccgaaaagcatcaccaccatataccattcaaatgcccatccccatacattggtgacgtaactgaatacagcattaataacgacattcgctgcatccagatctctgactgtaagccaacaaagtatgccgacgattattaacggcggaaagaaaaccttcggttctattcccgtttttctcttttcattcttcatgagttaattccactgtgaaaacgaatatttattttgcgttcccgtttgttttatttttgttaacatttaatataattattattaacctcgtggacgcgttaatggctaactcataatgggtattcaataagctgtattctgtgattggtatcacatttttgtttcgggtgaatagagggcgttttttcgttaattttgattaataatcagtttgttatgctctgttgtgagtaaaaaataacatctgactttcaatattggtgatccataaaacaatattgaaaatttctttttgctacgccgtgttttcaatattggtgaggaacttaacaatattgaaagttggatttatctgcgtgtgacattttcaatattggtgattaaagttttatttcaaaattaaagggcgtgatatctgtaattaacaccaccgatatgaacgacgtttccttcatgatttctggagatgcaatgaagattattacttgctataagtgcgtgcctgatgaacaggatattgcggtcaataatgctgatggtagtttagacttcagcaaagccgatgccaaaataagccaatacgatctcaacgctattgaagcggcttgccagctaaagcaacaggcagcagaggcgcaggtgacagccttaagtgtgggcggtaaagccctgaccaacgccaaagggcgtaaagatgtgctaagccgcggcccggatgaactgattgtggtgattgatgaccagttcgagcaggcactgccgcaacaaacggcgagcgcactggctgcagccgcccagaaagcaggctttgatctgatcctctgtggcgatggttcttccgacctttatgcccagcaggttggtctgctggtgggcgaaatcctcaatattccggcagttaacggcgtcagcaaaattatctccctgacggcagataccctcaccgttgagcgcgaactggaagatgaaaccgaaaccttaagcattccgctgcctgcggttgttgctgtttccactgatatcaactccccacaaattcctagcatgaaagccattctcggcgcggcgaaaaagcccgtccaggtatggagcgcggcggatattggttttaacgcagaggcagcctggagtgaacaacaggttgccgcgccgaaacagcgcgaacgtcagcgcatcgtgattgaaggcgacggcgaagaacagatcgccgcatttgctgaaaatcttcgcaaagtcatttaattacaggggatgctatgaacacgttttctcaagtctgggtattcagcgataccccttctcgtctgccggaactgatgaacggtgcgcaggctttagctaatcaaatcaacacctttgtcctcaatgatgccgacggcgcacaggcaatccagctcggcgctaatcatgtctggaaattaaacggcaaaccggacgatcggatgatcgaagattacgccggtgtcatggctgacactattcgccagcacggcgcagacggcctggtgctgctgccaaacacccgtcgcggcaaattactggcggcaaaactgggttatcgccttaaagcggcggtgtctaacgatgccagcaccgtcagcgtacaggacggtaaagcgacagtgaaacacatggtttacggtggtctggcgattggcgaagaacgcattgccacgccgtatgcggtactgaccatcagcagcggcacgttcgatgcggctcagccagacgcgagtcgcactggcgaaacgcacaccgtggagtggcaggctccggctgtggcgattacccgcacggcaacccaggcgcgccagagcaacagcgtcgatctcgacaaagcccgtctggtggtcagcgtcggtcgcggtattggcagcaaagagaacattgcgctggcagaacagctttgcaaggcgataggtgcggagttggcctgttctcgtccggtggcggaaaacgaaaaatggatggagcacgaacgctatgtcggtatctccaacctgatgctgaaacctgaactgtacctggcggtggggatctccgggcagatccagcacatggttggcgctaacgcgagccaaaccattttcgccatcaataaagataaaaatgcgccgatcttccagtacgcggattacggcattgttggcgacgccgtgaagatccttccggcgctgaccgcagctttagcgcgttgatccactctggcagggctgcattttggccctgccgctgacagggagctcttatgtccgaagatatctttgacgccatcatcgtcggtgcagggcttgccggtagcgttgccgcactggtgctcgcccgcgaaggtgcgcaagtgttagttatcgagcgtggcaattccgcaggtgccaagaacgtcaccggcgggcgtctctatgcccacagtctggaacacattattcctggtttcgccgactccgcccccgtagaacgcctgatcacccatgaaaaactcgcgtttatgacggaaaagagtgcgatgactatggactactgcaatggtgacgaaaccagcccatcccagcgttcttactccgttttgcgcagtaaatttgatgcctggctgatggagcaggccgaagaagcgggcgcgcagttaattaccgggatccgcgtcgataacctcgtacagcgcgatggcaaagtcgtcggtgtagaagccgatggcgatgtgattgaagcgaaaacggtgatccttgctgatggggtgaactccatccttgccgaaaaattggggatggcaaaacgcgtcaaaccgacggatgtggcggttggcgtgaaggaactgatcgagttaccgaagagcgttattgaagaccgttttcagttgcagggtaatcagggggcggcttgcctgtttgcgggaagtcccaccgatggcctgatgggcggcggcttcctttataccaatgaaaacaccctgagcctggggctggtttgtggtttgcatcatctgcatgacgcgaaaaaaagcgtgccgcaaatgctggaagatttcaaacagcatccggccgttgcaccgctgatcgcgggcggcaagctggtggaatattccgctcacgtagtgccggaagcaggcatcaacatgctgccggagttggttggtgacggcgtattgattgccggtgatgccgccggaatgtgtatgaacctcggttttaccattcgcggtatggatctggcgattgccgccggggaagccgcagcaaaaaccgtgcttagtgcgatgaaaagcgacgatttcagtaagcaaaaactggcggaatatcgtcagcatcttgagagtggtccgctgcgcgatatgcgtatgtaccagaaactaccggcgttccttgataacccacgcatgtttagcggctacccggagctggcggtgggtgtggcgcgtgacctgttcaccattgatggcagcgcgccggaactgatgcgcaagaaaatcctccgccacggcaagaaagtgggcttcatcaatctaatcaaggatggcatgaaaggagtgaccgttttatgacttctcccgtcaatgtggacgtcaaactgggcgtcaataaattcaatgtcgatgaagagcatccgcacattgttgtgaaggccgatgctgataaacaggcgctggagctgctggtgaaagcgtgccccgcaggtctgtacaagaagcaggatgacggcagtgtgcgcttcgattacgccggatgtctggagtgcggcacctgtcgcattctggggctggggagcgcgctggaacagtgggaatacccgcgcggcacctttggtgtggagttccgttacggctgatgttggtttgatacgtaacgccgcactgactctcattgcaaaaaacaggaataaccatgcaaccgtccagaaactttgacgatctcaaattctcctctattcaccgccgcattttgctgtggggaagcggtggtccgtttctggatggttatgtactggtaatgattggcgtggcgctggagcaactgacgccggcgctgaaactggacgctgactggattggcttgctgggcgcgggaacgctcgccgggctgttcgttggcacaagcctgtttggttatatttccgataaagtcggacggcgcaaaatgttcctcattgatatcatcgccatcggcgtgataagcgtggcgacgatgtttgttagttcccccgtcgaactgttggtgatgcgggtacttatcggcattgtcatcggtgcagattatcccatcgccaccagtatgatcaccgagttctccagtacccgtcagcgggcgttttccatcagctttattgccgcgatgtggtatgtcggcgcgacctgtgccgatctggtcggctactggctttatgatgtggaaggcggctggcgctggatgctgggtagcgcggcgatcccctgtttgttgattttgattggtcgattcgaactgcctgaatctccccgctggttattacgcaaagggcgagtaaaagagtgcgaagagatgatgatcaaactgtttggcgaaccggtggctttcgatgaagagcagccgcagcaaacccgttttcgcgatctgtttaatcgccgccattttccttttgttctgtttgttgccgccatctggacctgccaggtgatcccaatgttcgccatttacacctttggcccgcaaatcgttggtttgttgggattgggggttggcaaaaacgcggcactagggaatgtggtgattagcctgttctttatgctcggctgtattccgccgatgctgtggttaaacactgccggacggcgtccattgttgattggcagctttgccatgatgacgctggcgctggcggttttggggctaatcccggatatggggatctggctggtagtgatggcctttgcggtgtatgcctttttctctggcgggccgggtaatttgcagtggctctatcctaatgaactcttcccgacagatatccgcgcctctgccgtgggcgtgattatgtccttaagtcgtattggcaccattgttagcacctgggcactaccgatctttatcaataattacggtatcagtaacacgatgctaatgggggcgggtatcagcctgtttggcttgttgatttccgtagcgtttgccccggagactcgagggatgagtctggcgcagaccagcaatatgacgatccgcgggcagagaatggggtaaattgttcagatttctctcttttctgaatcaatattattgactataagccgcgtgaatatatgactacactttgtgggaaaacaaaggcgtaatcacgcgggctacctatgattcttataatttatgcgcatccgtatccgcatcattcccatgcgaataaacggatgcttgaacaggcaaggacgctggaaggcgtcgaaattcgctctctttatcaactctatcctgacttcaatatcgatattgccgccgagcaggaggcgctgtctcgcgccgatctgatcgtctggcagcatccgatgcagtggtacagcattcctccgctcctcaaactttggatcgataaagttttctcccacggctgggcttacggtcatggcggcacggcgctgcatggcaaacatttgctgtgggcggtgacgaccggcggcggggaaagccattttgaaattggtgcgcatccgggctttgatgtgctgagccagccgctacaggcgacggcaatctactgcgggctgaactggctgccaccgtttgccatgcactgcacctttatttgtgacgacgaaaccctcgaagggcaggcgcgtcactataagcaacgtctgctggaatggcaggaggcccatcatggataattaaggaatggcaggaggcccatcatggatagccatacgctgattcaggcgctgatttatctcggtagcgcagcgctgattgtacccattgcggtacgtcttggtctgggaagcgtacttggctacctgatcgccggctgcattattggcccgtgggggctgcgactggtgaccgatgccgaatctattctgcactttgccgagattggggtggtgctgatgctgtttattatcggcctcgaactcgatccacaaaggctgtggaagctgcgtgcggcagtgttcggctgtggcgcattgcagatggtgatttgcggcggcctgctggggctgttctgcatgttacttgggctgcgctggcaggtcgcggaattgatcggcatgacgctggcgctctcctctacggcgattgccatgcaggcgatgaatgaacgcaatctgatggtgacgcaaatgggtcgcagtgcctttgcggtgctgctgttccaggatatcgcggcgatcccgctggtggcgatgattccgctactggcaacgagcagtgccagcacgacgatgggcgcatttgctctcagcgcgttaaaagtggcgggtgcgctggtgctggtggtattgctggggcgctatgtcacgcgtccggcgctgcgttttgtagcccgctctggcttgcgggaagtgtttagtgccgtggcgttattcctcgtgtttggctttggtttgctgctggaagaggtcggcttgagcatggcgatgggcgcgtttctggcgggcgtactgctggcaagcagcgaataccgtcatgcgctggagagcgatatcgaaccatttaaaggtttgctgttggggctgtttttcatcggtgttggcatgagcatagactttggcacgctgcttgaaaacccattgcgcattgtcattttgctgctcggtttcctcatcatcaaaatcgccatgctgtggctgattgcccgaccgttgcaagtgccaaataaacagcgtcgttggtttgcggtgttgttagggcagggcagtgagtttgcctttgtggtatttggcgcggcgcagatggcgaatgtgctggagccggagtgggcgaaaagcctgaccctggcggtggcgctgagcatggcagcaacgccgattctgctggtgatcctcaatcgccttgagcaatcttctactgaggaagcgcgtgaagccgatgagatcgacgaagaacagccgcgcgtgattatcgccggattcggtcgttttgggcagattaccggacgtttactgctctccagcggggtgaaaatggtggtactcgatcacgatccggaccatatcgaaaccttgcgtaaatttggtatgaaagtgttttatggcgatgccacgcggatggatttactggaatctgccggagcggcgaaagcggaagtgctgattaacgccatcgacgatccgcaaaccaacctgcaactgacagagatggtgaaagaacatttcccgcatttgcagattattgcccgcgcccgcgatgtcgaccactacattcgtttgcgtcaggcaggcgttgaaaagccggagcgtgaaaccttcgaaggtgcgctgaaaaccgggcgtctggcactggaaagtttaggtctggggccgtatgaagcgcgagaacgtgccgatgtgttccgccgctttaatattcagatggtggaagagatggcaatggttgagaacgacaccaaagcccgcgcggcggtctataaacgcaccagcgcgatgttaagtgagatcattaccgaggaccgcgaacatctgagtttaattcaacgacatggctggcagggaaccgaagaaggtaaacataccggcaacatggcggatgaaccggaaacgaaacccagttcctaataaagagtgacgtaaatcacactttacagctaactgtttgtttttgtttcattgtaatgcggcgagtccagggagagagcgtggactcgccagcagaatataaaattttcctcaacatcatcctcgcaccagtcgacgacggtttacgctttacgtatagtggcgacaattttttttatcgggaaatctcaatgatcagtctgattgcggcgttagcggtagatcgcgttatcggcatggaaaacgccatgccgtggaacctgcctgccgatctcgcctggtttaaacgcaacaccttaaataaacccgtgattatgggccgccatacctgggaaagtatcggtcgtccgttgccaggacgcaaaaatattatcctcagcagtcaaccgggtacggacgatcgcgtaacgtgggtgaagagcgtggatgaagccatcgcggcgtgtggtgacgtaccagaaatcatggtgattggcggcggtcgcgtttatgaacagttcttgccaaaagcgcaaaaactgtatctgacgcatatcgacgcagaagtggaaggcgacacccatttcccggattacgagccggatgactgggaaagcgtattcagcgaattccacgatgctgatgcgcagaactctcacagctattgctttgagattctggagcggcggtaattttgtatagaatttacggctagcgccggatgcgacgccggtcgcgtcttatccggccttcctatatcaggctgtgtttaagacgccgccgcttcgcccaaatccttatgccggttgctcggctggacaaaatactgtttatcttcccagcgcaggcaggttaatgtaccaccccagcagcagccggtatccagcgcgtatataccttccggcgtacctttgccctccaggcttgcccagtgaccaaaggcgatgctgtattcttcagcgacagggccaggaatcgcaaaccacggtttcagtggggcaggggcctcttccgggctttctttgctgtacatatccagttgaccgttcgggaagcaaaaacgcatacgggtaaaagcgttggtgataaaacgcagtcttcccagcccccgcaattccggactccagttatttggcatatcgccgtacatggcatcaagaaagaagggataggagtcactgcttagcaccgcttctacatcgcgtgcgcactctttggcggtctgcagatcccactgcggcgtgatccctgcgtgggccatcaccagctttttctcttcgtcgatttgcagcagaggctggcgccgcagccagttaagcagctcgtcggcatccggcgcttccagcagcggtgtcaggcgatctttcggtttattgcggctgatcccggcaaataccgccagcagatgcagatcgtgattgcccagcaccagacgtacgctgtcgcctaaggatttcacatagcgcagaacatccaggctacccggcccgcgcgcgaccagatcgcccgtcagccagagggtatctttcccaggggtaaattctactttatgcagcaatgcgatcagttcatcgtaacaaccatgaacgtcgccaataaggtatgtcgccatattcttttaatgaatgagtgtgggaacggcgagtcggaatacgggaatgtcgatgctgaaagggacgccattttcatcgatcatttcgtagtgaccctgcatggtgcccagcggggtttcaatgattgcaccgctggtgtactggtactcttcgccaggcgcgataagtggctggacgccaaccactccttcgccctggacttcggtttcacggccattgccattggtgatcagccagtaacgccccaacaactgcactggcgctcgccccagattgcgtatggttacggtataagcaaaaacgtaacgttcattatcaggactagattgagcctcaatgtagacgctttgaacctgaatacacactcgggggctattgatcatcgttaactctcctgcaaaggcgcgttctccgccagatagttcgccatctggcaatattgcgcgacagagatattttccgctcgcatcgccgggtcgatccccattcccgttaacacctcgacgctaaacaggttgccgaggctgttacgaatggttttacgacgctggttaaaggcttcggtggtgatgcggctcaacacacgaacatctttaaccgggtgaggcatcgttgcatgaggaaccaggcgcacgacggcggaatccactttgggtggtggtgtaaaggcactcggcggtacttccagtaccgggatcacattgcaatagtattgcgccatgacgcttaatcgaccatacgctttgctgttcggtcctgcaaccagacgattcaccacctctttttgcaacataaagtgcatgtcggcaatggcatcagtatagctaaacagatggaacatcaacggcgtggagatgttataaggcaggttgccgaaaacacgcagcggctgacccattttctcggccagttcaccaaagttaaaggtcatcgcatcctgctgataaatcgtcagtttcgggcctaagaatggatgcgtttgcagacgtgccgccagatcgcggtcaagttcgatgaccgtcagctggtccagacgttcgccgaccggttcggtcaatgccgccagaccggggccgatttcgaccatcgcctggcccttttgcgggttaatggcagacacaatactgtcgatcacgaactgatcgttgagaaagttttgcccgaagcgtttacgggctaagtggccctggtggactcgattattcattgggtgttaacaatcattttgatggcgagattaagcgccgtaataaaactgccggcatcggctttgccacgtcccgccagttcaagcgcggtgccgtggtccacacttgtgcgaataaagggcaggcccagcgtaatgttcacaccgcgcccgaagccctggtattttagcacgggaagaccctgatcgtggtacatcgccagcacggcgtcggcgttatcaagatatttcggctgaaacagggtatcggcaggcagcggcccgttgagtttcatcccctgcgcccgcagctcattgagcaccggaataatggtgtctatctcttccgtacccatatgaccgccttcgcccgcgtgcggattcagcccgcagaccagaatgcgcggttcggcaataccaaatttggtccgcaaatcgtgatgcaaaatagcaatcacttcgtgcaaaagtgcaggggtgatagcgtctgcgatatcgcgcagcggtaaatgcgtcgttgccagcgccacgcgaagttcttcggtcgccagcatcatcaccacctttttcgcctggctacgctcttcgaaaaactcggtatgaccggtaaaaggaatgccagcgtcgttaataacgcctttatgcaccggacctgtgatcagcgcggcaaattcgccgttcagacaaccatcgcacgctcgcgccagcgtttccaccacataatgcccattttcaaccgctaactgccccgcagtgacaggtgcacgtagcgcgacaggaagtagcgttaatgtgcccgcagtttgcggttgtgcaggggagttgggggaataagggcggagggtgagcggcaaaccgagcatcgctgcccggttggtaaggagagtggcatcggcacaaacaaccagttcgaccggccactcacgctgtgcaagctggacaactaagtccgggccaatcccggcgggctcgccgggagtgatcacaacacgttgggttttaaccattagttgctcaggattttaacgtaggcgctggcacgttgttcctgcatccagcttgctgcttcttcgctgaacttacggttcatcagcatgcggtatgcacgatctttctgcgcagcgtcggttttatcgacattacgggtatccagcagttcgattaaatgccagccgaaactagagtgaaccggtgcactcatttgacctttgttcaggcgagtcagggcgtcacggaaggccggatcgaaaatatctggtgtagcccagccgagatcgccgccctggttagcagagcctggatcctgagagaactctttcgctgcggcagcaaaagtcgttttaccactcttgatatcagcagcaatctgttccagtttcacacgggcctgttcgtcagtcatgatcgggctcggtttcagcagaatatggcgagcatgaacttcggtcacgctgatatttttgctttcgccgcgcaggtcgttaactttcagaatatggaagccaacgccggaacgaatcgggccaacaatgtcgcctttcttcgcggtgcttaatgcctgggcgaagatcccgggcaactcctgaatacggccccagcccatctggccgccgttcagcgcctgctggtcggcagaatgagcaatcgccagcttaccgaaatcagcgccgttacgcgcctgatcgacaatggcgcgcgcctggctttccgcttcgttcacctgatcagaggtcgggttttccggcagcgggatcaggatgtggctcaggttcagctcagtgctggcgtcgttttggttacccacctgctgcgccagggattcgacttcctgcggcaggatggtgatgcgacgacgcacctcgttgttacgcacttcagagataatcatctctttgcggatctggttacgataggtgttgtagttcagtccatcgtaagccagacggctgcgcatctgatccagcgtcatgttgttctgtttcgcgatgttagcaatcgcctgatccagctgctcatcggagattttcactcccattttctgccccatctgcaggatgatttgatccatgatcaaacgttccatgatttggtggcgcagcgtcgcgtcatcaggaagttgctgccttgcctgagcagcgttcagttttacgctctgcattaatccatcaacgtcgctttccagcacgacgccgttattgacgacggctgcgactttatcgactacctggggggcagcgaaactggtattcgcgatcatggcgataccgagaagcagcgttttccagttcttcatactttttccatttcaattaaccgcactgcggattacgtggtaaatcaacaaatcacaaagtgttttgatacggcagaatgttgctacgcagcatctcttgcgtacccagaccgtagttggagctcaggccgcgaagttcgatgttaaagccgattgcgttgtcatataccgcatgttgtttatcgttatcccaaccgttcagcttccgctcgtaaccgacgcgaattgcatagcagcaggagctgtattgcacacctaacatagagtcggcttgcttgttagcattggtgtcgtagtagtaggccccaacaatggaccaacgatcggcaattggccagctggcgacagcacctacctggctaataccattcttatattgctcagcagtggaatagtacttaggcagcgtagcctgaatatattccgggctggcgtaacggtaattcagctgtaccagacggtcttcatcccgacggtattcaatgctggagttactggtcgctacgttatccagacgtgtatcgtactgaatcccgccacgcaatccccaacgctcggagatacgccagtaagtatcgcctgcccacaccagactacccgttttgtcgtcattctcccatgttatgttgtcatcgccagtgcgagactccgtgaaatagtagatttgaccaacggaaatattaaaacgttcaacggcagcatcatcatatatgcgagatgtgacaccggtcgtcacctggttagcggaggcaatacggtcaagaccgccgtaagtccggtcccggaacaggccagagtagtcagattgcagcagagagctgtcgtagttatagatgtcgctctgatcgcgatacggcacgtacaaatactgcgcgcgcggttccagcgtttgggtataacccggagccagcatttccatatcgcgttcaaagaccattttgccgtcaactttgaattgcggcattacgcggttaacggattcgtccagcttggtcgtgtttctggagttataccagtcaagattggtttgctgataatgggttgccagcaacttcgcttcggtattgatgctgccccagttattagagagcggcaaattgatggtcggttccaggtgaacacgggttgcttcaggcatgtcgtctctggtgttaacaaagtgcactgcctggccgtaaatacgcgtatcaaacggaccaacatcattctggtagtaattaacgtctaactgcggctctgcgctgtagctactggtgttctgttcgctgaaaacctggaactgcttggtactaacggtggcattgaagttttgcaccgcatagccaacgctgaatttttgcgttgcgtagccgtcagtactggaaccgtacttgttatcgaaatcattgaagtagctaggatcgctgaccttggtgtagtcgacgttgaaacgccacacctgatccatgaccccggagtggttccagtagaataaccaacgacgactactgtcatcgttcgggtgttcatcttcatagactttatcactaggcagatagtccagttccatcaagccagcgcccgcctgggagaggtagcggaattcgttctcccacatgatgttgccacgacgatgcatataatgcggcgtgatggtggcatccatatttggcgcgatgttccagtaatatggcaggtagaactcaaagtagttggtggtggtgtacttggcgttcgggatcaagaaaccagagcgacgtttgtcacccaccggcaactgcaaataggggctataaaagatcggtaccggacccaccttaaagcgggcgttccagatctccgcaacttgttcttcgcggtcatgaataatttcgctacctaccacgctccaggtgtcagaacccggcagacaggaggtaaagctaccgttatccagaatggtatagcggttttcgccacgttgtttcatcaggtccgctttaccgcgaccctggcgacccaccatctggtaatcaccttcccagacgttggtatctttggtgttcagattcgcccagcctttcggccctttgaggatcacctggttatcgtcgtaatggacattaccgagcgcatcaacggtacgtaccggctccggttgtcctggtgcctctttttgatggagctgcacttcgtcggcctgcagacggctgttaccctgcatgatatccacgctgccagtaaacacggcgtcatccgggtagtcccctttcgcgtggtcagcattgatagtcacgggtaagtcattggtatcgccctgtaccagaggacggtcatagcttggcacgcccaacatgcactgactggcgaggtcggctgccagtccctgttgactataaagggcggtggcaatcatggtggccaggagagtggggatacgttttttcatacgttgattttattgttccatcatcggtaacgttgcgcgtgacaaacggtcagagactaacgtactcgtcatctctacgctagtgttaatcctgtccgaatagcgtcagtggtgttaggcacggcattgaatgacaggtatgataatgcaaattataggcgatgtcccacaattgaccgcagccggaaaacggtaaaagcacctttatattgtgggagatagccctgatatccgtgtgtcgatttggggaatatatgcagtattggggaaaaatcattggcgtggccgtggccttactgatgggcggcggcttttggggcgtagtgttaggcctgttaattggccatatgtttgataaagcccgtagccgtaaaatggcgtggttcgccaaccagcgtgagcgtcaggcgctgttttttgccaccacttttgaagtgatggggcatttaaccaaatccaaaggtcgcgtcacggaggctgatattcatatcgccagccagttgatggaccgaatgaatcttcatggcgcttcccgtactgcggcgcaaaatgcgttccgggtgggaaaaagtgacaattacccgctgcgcgaaaagatgcgccagtttcgcagtgtctgctttggtcgttttgacttaattcgtatgtttctggagatccagattcaggcggcgtttgctgatggtagtctgcacccgaatgaacgggcggtgctgtatgtcattgcagaagaattagggatctcccgcgctcagtttgaccagtttttgcgcatgatgcagggcggtgcacagtttggcggcggttatcagcagcaaactggcggtggtaactggcagcaagcgcagcgtggcccaacgctggaagatgcctgtaatgtgctgggcgtgaagccgacggatgatgcgaccaccatcaaacgtgcctaccgtaagctgatgagtgaacaccatcccgataagctggtggcgaaaggtttgccgcctgagatgatggagatggcgaagcagaaagcgcaggaaattcagcaggcatatgagctgataaagcagcagaaagggtttaaatgaccctgtaaatgatgctgagtaactgcccacgattaaaggtggccgccctggcggtcacttctttgagaaaaggcgtttactcagaatggtggacaggctcaatgcacgatttacgggaggggttctgtaggttttatcgcgttgaccctgcttaaggttgagagctttacgacgagcggaattatatttttacgtcttaaaaataaaaaacacatacctgaatgagcgatttttgaaagtatatttattcagaacgcgcatcatgagtttttaactcaatgcgaggctattaccatgaaagtaagtgttccaggcatgccggttacacttttaaatatgagcaagaacgatatttataagatggtgagcggggacaagatggacgtgaagatgaatatctttcaacgcttgtgggagacgttacgccatctgttctggagtgataaacagactgaggcttataaacttctgttcaatttcgtgaataaccagactggcaacatcaacgccagtgaatactttactggggctatcaacgagaatgagagagaaaagtttatcaatagcctggaattattcaataaacttaaaacatgcgcaaaaaatccggatgagttggtcgcaaagggcaatatgcgctgggtcgcccagaccttcggggatatcgagttaagtgtcactttttcattgaaaagaataagatatgtactcagacgttgcagctgcataagggccaaggtaacttgggcgttgatcttagaaaggcttaccttcccggcgttgacatgagggattgttaccttggtaaaaaaacaatgaaaggtagcaatgatatcctttatgagagacctgggtggaatgctaacctgggcgtgctaccccggacggtgctaccccggacggtgctaacccggacggtgctaacctggacggtgctaccgtgaacggtgctacctccttatatgatgaggtaattattattaataaaatcccccccaaaaaaattgatactaaaggagttgctactgaagaagttgctactaaaaaagtactgctgaacaaattactgacaacgcaattattgaatgagccagaataagctaaggttgaaggggctggaacgccccttcaaccttagcagtagcgtgggatgatttcacaattagaaagacctgcatgatgagctagagaagaggctagtgacgcaaggcgtcgtgcaggacacggatcaccgagatgggcatcgccaaccagactgctaattagcccatgaataacaatcagaaaggaccataacagacccgttaaaatgaaatataagagacggtcaacgggtgaagaaaaagttcaaaaattcgctgtggagcaggaagggaattaccgaatggaaagcgtagccacacgcaacaactgaaagcagtttggcagaaacaaaaaatccccggactcggggatttatgtacaagaggcagcccttaggatgagggtataaacgtacaggaaaggttaaaaatccgctggcgctttaaacgtcatactattgccatacgccggatgggtaatcgtcaacatctctgcatgtagcaacaaacgtggtgccatcgctctcgcttctggacttgcataaaaacgatcgccgagaatcggatgacccagcgccagcatatgcacacgcaattgatggctacgcccggtaatcggttttaacaccactcttgccgtgttatccgccgcatactccaccacttcatattccgtctgcgcaggtttacccgtttcgtaacagactttctgtttcgggcggtttggccagtcgcaaatcagcggcagatccaccagaccttctgcgggggatggatgcccccagacgcgggccacatactgctttttcggctcgcgctcgcggaactggcgttttaactcccgctccgcggctttggtcagcgccactacaatcacgccgctggtagccatatccagacgatgcacgctttctgcctgcggataatcacgctgaatgcgcgtcatcacgctgtctttgtgctcttccagacgacccggcacactcaacaaaccgctcggcttgttgaccaccataatatggtcatcctgatacaggataaccaaccagggttcctgcggtggattgtagttttccatccccattttcggctccgttactgatgcgttacaacgatcaaacgcagggcatccagacgccaacctgcctgatccaggctttccattacctgctgacggttgctctcaatggcggtcagttcgtcgtcacgaatgttcgggttcactgcacgcagagcttccagacgagacagctcggcagacagtttttcgtcggcttcgttacgcgctgcatcaatcaatgcacgggcagatttctcgatctgcgattcacccagttgaaggatagcgtgaacatcctgctgcacggcgttaaccagtttgctgccggtgtgacggttaaccgcgttaagctggcggttaaaggtttcaaactctacctgcgccgccaggttgttgccgtttttatccagcagcatacgtaccggcgtcggtggcaggaagcggttgagctgcaactgcttcggagcctgggcttcaaccacataaatcagttccaccaacagcgtacctaccggcaacgctttgttttttaacagactaatcgtgctgctaccggtatcgccagaaaggatcagatccagaccgttgcggatcagcggatgctcccaggtaataaactgtgcatcttcacgcgccagcgccacttcacgatcaaaggtgatggtgatgccatcttcgctcaggccagggaagtccggcaccagcatatgatcggacggcgtcagcacgatcatgttgtcgccgcgatcgtcctgattgataccgataatatcgaacaggttcatggcgaaggcgatcaggttggtatcgtcatcctgctcttcaatgctttctgccagtgcctgggctttttcgccaccgttggagtggatttccagcaggcggtcacgaccctgttccagctgtgctttcagcgtttcatgttgctcgcggcagtttttgatcagatcgtcaaagccttcggtttgatccggactagccagatagttaatcagatcgttgtatacgctatcgtaaatagtgcgtccggtcgggcaggtgtgctcaaatgcatccagaccttcgtgataccagcgcaccagcacgctctgagcggttttctccagataaggcacatggatctgaatatcgtgcgcctggccgatacgatccagacgaccaatacgctgctccagtagatccgggttgaatggcaggtcaaacatcaccatgtggctggcgaactggaagttacgtccttcagaaccgatttcactgcacagcagtacctgtgcgccggtgtcttcttcggcaaaccaggcggcagcgcggtcacgttcgataatgctcataccttcgtggaacaccgcagcgcgaataccttcacgttcgcgcagtacctgctccagttgcagcgcagtggcagctttggcgcagatcaccagcactttctgagagcgatggctggtcaggtagcccatcagccactcaacgcgcggatcgaagttccaccaggtggcgttatcaccttcaaattcctgataaatacgctccgggtagagcatatcgcgagcacgatcttccgcacttttacgtgcgcccataatgccggagactttaatagccgtctgatactgcgtcggtagcggcagcttaatggtgtgcagctcgcgtttcgggaatcctttcacaccgttacgcgtgttacggaacagcacgcggctggtgccgtggcgatccatcagcatgctaaccagctcctgacgggcgctctgggcatcttcgctgtcgctgtttgctgcctgcaacagcggctcgatatcctgctcgccgatcatctcgccgagcatgttcagttcgtcattgctcagtttgttacctgccagcagcatggcaacggcgtccgcaaccggacgataatttttctgctcttcaacgaactgcgcaaaatcgtggaaacggttcgggtccagcagacgcagacgggcgaagtggctttccatccccagctgttccggggtcgcggtcagcagcagaacgcccggcacgtgctctgccagttgttcaatggcctgatattcacggcttggcgcatcttcgctccacaccaggtgatgcgcttcatcgaccaccagcaggtcccattcggcttcacagagatgttccaggcgctgtttgctacgacgggcaaaatccaggctgcaaatcaccagctgttcggtgtcaaacgggttgtaagcatcgtgctgagcttcggcataacgctcatcatcaaatagcgcaaagcgcaggttgaaacggcgcagcatttctaccagccactgatgctgtaaggtttccgggacgataattagcacacgttcagcagcgccagagagcagttgctgatgcaggatcatcccggcttcaatggttttccctaaacccacttcgtcagccagcaggacgcgcggcgcgtggcggcgaccaacatcatgagcgatgttgagctgatgcgggatcaggctggtacgctgaccgcgcaggccgctgtacggcatacggaactgttcgctggaatatttacgcgcgcgataacgcagcgcaaagcggtccatacggtcaatctgcccggcaaacagacggtcctgcggtttgctgaacaccagtttgctatcaaggaaaacttcacgcagggctacgccggactcttcagtatccaggcgagtaccgatataggtcagcaagccattttcttcttttacttcttcgacttgcatctgccagccgtcatggctggtaatggtatcaccagggttgaacatcacgcgggtcacgggggaatcactgcgtgcgtacagacggttttcaccagtagatgggaaaagtaaagtgacagttcgcgcatccaccgcgacaacggttccaagtcccaattcgctttctgtatcgctgatccagcgttgaccaagtgtaaaaggcatatgtgttcggctctatatctttaattgcaggcaataaccacccgctaccgtgcttatgaggtagtggtgttattcaggtccaggaatggaaagggcgctatggtactggatggcaaagcattcgtcacgcatcaaaatggtatctggcgaactcttttttttgctcaaaatagcccaagttgcccggtcataagtgtagcaaaattatcctcaataaaagggagtattccctccgccacgggttgtagctggcgggtcagatagtgttcgtaatccagtggactacgttggtagtccagcggctccgggccgttggtggtccatacgtacttaatggtgccgcgattctgatattgcaaggggcgaccacgcttttggttttcttcatcggcaaggcgagcggcgcgtacatgaggcggcacattacgctgatactcgctcagcggacggcgaaggcgtttacggtaaaccagtcgcgcatccagttcacccgccatcagtttgtcgatggtttcgcgtacatattcctgatatggctcgttgcggaagatgcgcaggtatagctcctgctgaaactgctgggccagcggcgtccagtcggtgcgcacggtttccagccctttaaacaccatccgctgcttgtcgccctcctgaatcagtccggcataacgctttttactgccggtatcggctccgcgaatggttggcatcagaaaacggcagaaatgggtttcatactccagttctaatgcgctggtcagccgttgtttttgcagcgtttccgcccaccaggcgttaacgtgctgcaccagtgcacgaccgattttcgccgcttcttcttcgctatgtgcgcctttcagccagacaaacgtactgtcggtatcgccgtagataacgtcgtagccctgtgcttcaatcaacgctttggtttgccgcatgatctgatgaccacgcatggtgatgctgcttgccagccgcggatcgaagaagcggcaggcggtggtgccgagcacgccataaaaggcattcatgatgattttcagcgcctggctcagcggtttgttaccctggcgtttggcttcatcgcgcccgtgccagatgttagtcacaatctccggcaggcaatgtttttctcggctgaaccaggcatcgagaaaaccttcggtactgtgctctggatcaggctgcgccatgccttccaccagcccgacgggatcaatcagaaaggtgcggatgatgctcgggtacaggcttttatagtccagcaccagcacactatcataaagccctggccgactatccatcacgtagccgccagggctggcgtgcggcggcacttcgccgagattaggcgcgacataaccagcgcgatgcattcgcggaaaatagagatgaccaaatgccgccacgctaccgccgtgtcggtccaccggcaggccgttcaccgttgcccgttcgagtaaaaatggcatgatttcagttttgtggaagatctgcgtcaccagctcgcaatctttcaggttataagttgccagcgcaggtttatcttcggcgaaacggcggtcaatttcgtccattcgatcccacgggttatcgatagattttccttcgcctaatagctcctgagcgacagtttccaggctgaaactagagaaattccagaacgcggatttcagcgcctcgataccgtcgataattagccgacctttagcctgggcaaaaaagacgccgtttttaaagccgtgctcgcgccactccagctcgctattatcgcgcccaagacgcagcggaagacggtaacgctcggcatgtttttgcagcattcgcagatcgaactgcaccacgttccaaccgatgatcacatcaggatcgtagttggcaaaccaggcgttgagtttttccagcaactgcgggcggctggcgacgtattccagttcgaaatcaaggctggaggcgtcgccattctccggccccagcatataaacgatgcgctgcccgcagccttccaggccgatgcagtacagctcaccgtggcgggtggtttcaatatctatagaaacccacttgagcggcggacgatagtcgggatgcggtttcagacgggcattaacgatagtgccattgtgcatatcaccctcgacccacaccggactggtgataaaccgctccatcagatagcgttctggcggacgcacatcggcctcgtagacggtaacgccaccttcacgcaggcgcttttcgtaattcatcaattggcgatgggcgcgacagtaaaggccatacaccggctggcggtgaaaatcctttaacgccagcggtgtcaggcgaaagccttgttcaccctgcaaaatatgctgagcgcggggaacctgatcggcgggaataaacgccacggactcttgcggtgcaagcgtaacctgcaacggcccgttgtccgtcgccagccagaaggagacttctgtcccttgcggggtgtcccgccagtgtcgggttaagataaaacctgcctgcgccacgctgaaaatccatcaaaaaaccaggcttgagtatagcctggtttcgtttgattggctgtggttttatacagtcattactgcccgtaatatgccttcgcgccatgcttacgcagatagtgtttatccagcagcgtttgctgcatatccggtaactgcggcgctaactgacggcagaatatccccatataagcgacctcttccagcacgatggcgttatgcaccgcatcttcggcatttttgccccatgcaaacgggccgtgggaatggaccagaacgccgggcatttgcgctgcatcgataccctgtttttcaaaggtttctacgatgacgttaccggtttcccactcatattcgccgttgatttctgcgtcggtcattttgcgggtgcagggaatggtgccgtagaaatagtcggcgtgggtggtgccggttgctggaatgctctgacccgcctgcgcccagatggtggcgtggcggctgtgcgtatgcacaatgccgccaatggaggggaatgcctgatagagcagccggtgagttggcgtgtcggaggagggctttttcgtaccttcaaccacttcaccggtttcgatgctaaccacgaccatatcgtcagcggtcatgacgctgtaatcgacgccggaaggtttgatcacaaagacgccgcgctcgcgatcaacggcgctgacgttgccccatgtgagcgtgaccaggttgtgttttggcagcgccaggttggcttctaatacctggcgtttgagatcttctaacatgttgactccttcgtgccggatgcgctttgcttatccggcctacaaaatcgcagcgtgtaggcctgataagacgcgccagcgtcgcatcaggcgttgaatgccggatgcgctttgcttatccggcctacaaaatcgcagcgcgtaggcctgataagacgcgccagcgtcgcatcaggcgttgaatgccggatgcgctttgcttatccggcctacaaaatcgcagcgtgtaggccagataagacgcgtcagcgtcgcatcaggcgttacataccggatgcggctacttagcgacgaaacccgtaatacacttcgttccagcgcagcgcgtctttaaacgctggcaggcgtgtgtcgttatcaatcaccgtgatttcaatgtcgtgcatctcggcgaattggcgcatatcgttgaggttcagtgcatggctgaagacggtatggtgcgcgccaccagcgaggatccacgcttcggaagcagttggcagatccggttgcgctttccacagcgcattcgccaccggcagtttcggcagggagtgcggtgttttcaccgtgtcgatgcagttaaccagtagacggtaacgatcgccgagatcaatcaagctggcgacaatcgctgggccggtttgggtattgaagatcaggcgggcaggatcgtccttaccaccaataccgagatgctgaacgtcgaggatcggtttctcttctgcggcgatgctcgggcagacttccagcatatgggagccgagcaccaggtcattacctttctcgaagtgataggtgtagtcctccataaaggaggtgccgccctgcagaccggtactcatcaccttcatgatgcgaagcagggcggcagttttccagtcgccttcgcccgcaaagccgtaaccctgctgcatcagacgctgtacggccagaccaggaagctgtttcagaccgtgcaaatcttcaaaggtggtggtgaacgcgtggaagccaccttgttccaggaaacgcttcatccccagctcaatacgcgccgcttccagcacgttctgtcgttttttgccgtggatttgtgtggcaggcgtcatggtgtagcagctttcgtactcatcgaccagcgcgttaacatcgccgtcgctgatggagttcaccacctgcaccagatcgccaaccgcccaggtattgacggagaaaccgaacttgatctgtgcggcaactttatcgccatcggtgaccgccacttcacgcatgttatcgccaaatcggcagactttcagatgacgggtatcctgtttagagaccgcctgacgcatccaggagccgatacgctcatgggcttgtttatcctgccagtgaccggtaaccacggcatgttgctgacgcatacgcgcgccaatgaagccgaactcgcgaccgccatgtgcagtctggttcaggttcataaagtccatatcgatactgtcccacggcagcgccgcgttgaactgggtgtggaattgcagcaacggtttgttgagcatggtcaggccgttgatccacattttggccggggagaaggtgtgcagccacaccaccagaccagcgcaacgatcgtcgtaattcgcgtcgcggcaaatagcggtgatttcatccggcgtggtgcccagcggtttcaacaccagtttgcagggcagtttcgcttccgtattcagcgcattaacgacgtgctcggcatgttgggtgacctgacgcagggtttccgggccatacagatgctggctgccaatgacaaaccacacttcataattatcaaaaatcgtcattatcgtgtccttatagagtcgcaacggcctgggcagcctgtgccggggcggaagttggaagatagtgttgttcggcgctcatcgcccattgctgatagcggcgataaagctgttcaaagcgttgtgcctgctcgctgcacggttgcagggttttctctaccgcactggccattttttgctgagcacttgggatgtctgcgtgcactttcgcggcgacggcagcaaaaatcgccgcaccgagcgcacagcactggtcagaggcaacaatttgcagcgggcgattcagcacgtcgcagcaggcctgcataatgacctggtttttccgcgcgatgccgcccagtgccatcacgttattaacggcgatcccctgatcggtaaagcactccatgattgcgcgtgcgccaaaggcggtggcagcaatcaaaccgccgaacagcagcggagcgtcggtagcgaggttaagatcggtaatcacccctttcaggcgttggttagcgttcggtgtgcggcggccgttaaaccagtcgagcaccaccggcaggtgatccagagacggatttttggcccatgcttcggtcagcgccggaagcagttgtttctggctggcgttgatttgcgttttcagttccggatgctgggcggcaagctgttccagcggccagccgagtacgcgaccaaaccaggcgtagatatcaccaaacgcgctttggcctgcttccagaccgataaatccaggcaccacgctgccatcaacctgaccgcaaatacctttaactgcccgctcgccaacgctctgtttgtcggcaatcagaatgtcgcaggtggaagtaccgataacttttaccagtgcgttaggctgtgcgcctgcgccaactgcgcccatatggcagtcaaacgcgccgccggaaatcaccacgctttcaggcaggccgagacgctgcgcccattccgggcataaggtgcccaccggaatatcggcagtccaagtgtcagtgaacagcggggaaggcaaatggcgattgaggatcgggtccagctcatcaaagaaactggctggcggcaggccgccccagctttcgtgccacagagatttatgcccggcgctgcaacgtccgcgacgaatatcctgcgggcgggtggtaccggaaagcagagctggcacccagtcgcacagctcaatccagcttgcggcagattgcgccacggcgctgtcctggcgagtcacatgcaggatttttgcccagaaccattcgctggaataaataccaccaatgtagcgggagtagtcaacgttgcccggcgcgtggcacaaacgggtaatctcttccgcttcttcaaccgcagtgtggtctttccacaatacgaacatcgcgttcgggttttcggcaaactccgggcgcagcgccagcacgtttccgtcggcatcaatcggtgcgggcgtgctgccggtactgtcaacgccaatcccgaccacagctgcgcgctgttcgacgctaagctctgcaagcacggttttcagtgccgcttccatactctcaatgtagtcacgcggatgatgacggaactggttattcggggcatcacaaaattgccctttctgccaacggggataccactctacgctggtggcgatctcttcaccggtagcgcagtccaccgccaaagctcgcacagaatcactgccaaaatcgaggccaattgcaatcgccatcgtttcactccatccaaaaaaacgggtatggagaaacagtagagagttgcgataaaaagcgtcaggtaggatccgctaatcttatggataaaaatgctatggcatagcaaagtgtgacgccgtgcaaataatcaatgtggacttttctgccgtgattatagacacttttgttacgcgtttttgtcatggctttggtcccgctttgttacagaatgcttttaataagcggggttaccggttgggttagcgagaagagccagtaaaagacgcagtgacggcaatgtctgatgcaatatggacaattggtttcttctctgaatggtgggagtatgaaaagtatggctgaagcgcaaaatgatcccctgctgccgggatacagctttaacgcccatctggtggcgggtttaacgccgattgaggccaacggttatctcgatttttttatcgaccgaccgctgggaatgaaaggttatattctcaatctcaccattcgcggtcagggggtggtgaaaaatcagggacgagaatttgtctgccgaccgggtgatattttgctgttcccgccaggagagattcatcactacggtcgtcatccggaggctcgcgaatggtatcaccagtgggtttactttcgtccgcgcgcctactggcatgaatggcttaactggccgagtatatttgccaatacgggtttctttcgcccggatgaagcgcaccagccgcatttcagcgacctgtttgggcaaatcattaacgccgggcaaggggaagggcgctatagcgagctgctggcgataaatctgcttgagcaattgttactgcggcgcatggaagcgattaacgagagcctccatccaccgatggataatcgggtacgcgaggcttgtcagtacatcagcgatcacctggcagacagcaattttgatatcgccagcgtcgcacagcatgtttgcttgagcccgagccgtctgagtcatcttttccgccagcagttagggattagcgtcttaagctggcgcgaggaccaacgcattagtcaggcgaagctgcttttgagcactacccggatgcctatcgccaccgtcggtcgcaatgttggttttgacgatcaactctatttcagccgagtatttaaaaaatgcaccggggccagcccgagcgagtttcgtgccggttgtgaagaaaaagtgaatgatgtagccgtcaagttgagttaattggtaacgaatcagacaattgacggcttgacggagtagcatagggtttgcagaatccctgcttcgtccatttgacaggcacattatgcaagcattgctggaacactttattacccaatccaccgtgtatagtttgatggcggtggtgttggtggcctttctggagagcctggcgctggtcggtttgattctacccggtacggtgctgatggcggggctgggagcgctgattggcagcggcgagttaagtttctggcacgcctggctggcagggattattggctgcttgatgggcgactggatttctttctggctgggttggcgttttaaaaagccgttgcatcgctggagttttctgaagaaaaacaaagcactacttgataaaactgaacatgcgttgcatcaacacagcatgttcaccattctggtcggtcgttttgttggcccgacgcgtccgctggtgccaatggtggcgggaatgctggatctgccggtggctaaatttattacgccgaatattatcggctgcctgctgtggccgccgttttacttcctgccagggattctggcgggcgcggcgatcgatattcctgccggaatgcagagcggtgagtttaaatggttgctgctggcaacagcggtgtttttgtgggttggtggctggctgtgctggcggttatggcgcagcggtaaagcgactgaccgtttgagtcattatttgtcccgcggtcgtttgttgtggctgacgccgttgatttctgccatcggcgtggtggcgctggtggtgttaattcgccacccgttgatgccggtgtatatcgatattttgcgtaaagtggttggggtttaagagatagtcttgtgcgggttgcctgatgcgacgcttgccgcgtcttatcaggcctacaaaacgcactacccgtaggtcggataaggcgttcacgccgcatccgacagtgcatattaacccgtaatccccaatagtgcgctagcactcgccttaccgctcaacaactcattggtcataccctgccaggcgatgcgcccgtcggcgactactacgctgcgcgtggcgatccgcgccgcatcttccacgctgtggctcaccatcaatagcgtcattttttgctgctggcagctcgtgctcaccagcgtcaacatctcctgacgtaacgccggatcgagcgcagagaacggttcatcgagcaataaaatcggctgttcgcgtaccagacaacgcgctaacgccactcgctgtcgctgaccgccggaaagctcgcccggtaaccgcgccattaaattatcaatccccatctggcgggcgatagcgtgcattttcccctgctgtaccgcgttcagtttcaatcccggatttagccccagcccgatgttctgtgcgaccgtcaggtggctgaacaggttgttctcctgaaacagcatgctcaccggacggcgactcggcggcatagttgtgtgatctacgccatcgatagtcaggctaccgctggctggcgtcagaaaaccggcgatcaaattcagcagggtacttttacccgcgccgcttggcccgaggatcgccacctgctcgccgcgttccaccgttaagctaaaacgcatcggcaaatggtggtaaagccaggtgatatcagtcagttttaacatttcgccccggtagtttttcaatcacggtaaacagcagaaaacagagcagcagcagaattaacgcggtgaccgcaccgtcctggctgcgataggagccaatttgctggtagagataaaacggcagggtgcggaaatcatcgttaccgaacaacgccaccacgccaaaatcaccaatgctcagcacgcatgcaaaggccagcgcctgcgccagtggacgtttcagggcgcgcagctccaccacttttaagcgactccagccttcaatccccaggctctgacataacatgctgtagcgggcggtgatatcgcgcatcgggttttccagcactttcagcgcataagggatcgccattaacgcattggtgaaaatcacaatgccgtcagcagattgtggcaggccgatagtgttgttgagcagtaaaaagaagccggtagccagcacaatccccggcatggcgaggatcaacatgccgctcatctccagcacctgacccgccagcattttctgccgcgcccgcagttcgcgactgctccatagcagcatcatggtcagcactacgcacaatacacctgccgccagcgcaatacgcaagctggtccacagcgcctgccacagcaccggttgtgccagcacttccggcaactggcgatttaccccatcgacgatcaccgccagtaacggtggcagcaacagcagcagcgccagcacaattaacaccgtgtcgcaaatgcggctatgcagacgatcgtccgggtcgcgccagccttgcagcagcgtggtgccgggcgcaatggccttactcaatcgctgactcaacagcaccagcccgaggcagcacaccatctggagcagcgccagcattgccgcgcgggcaggatcgtagtcgtaactcagcgcctgatagattgccagctcgatagtggtcgcctgcggaccgccccccaggcttagcacggtggcgaagctggcgaaacagagcataaagataagcgcagcaaccggcgggatttgtcgccgtaaccacggccattcgacgaagcggaaaaaatgccagctacgcatcccaagctgggcggcaagttgacgctgttcgccggggatgttttccagtgcctggagtaataagcggctcgccatcggcagattaaaaaacacatgggccagcaaaataccttgcaggccgtaggggctaaaggtccactccagaccgaggctttggcagagtgttgccagccagccctggcgaccatagacgctaagaatgccgaaaacagcgaccaacaccgggaggatcaaggtcattgcacacagacgcaacagcgccagccgacccggaaagcgcctgcgatagagcgcgcgggcgaggaatatcgcgggtatgacagagagcagtgcgctgagaaacgcctgccagaaggagaagcgcaccacatgccacagatagctgtcctgccagactgccacccagtcatcctgcggcgcgttccaccacagggcgagaaacgccgccagcgcaaccgctaccaccagcgtggtggcgcttacacctggaattaaccagccgggaattaacggctgacggcgcgttgccattcgctaatccatgcctgacgttgtgccgccacttcggctggcgtgaactccaacgtggttgcgggtttggtcaatttttcaaaaccggcaggcagcgtgacgtttgccaccggatacatccagttgccggttgggatcgcattctggaaagccggagaaaccataaactggaggaatttttgcgccagctccggctgcttgctggcagcggtgcgggcggcgacttccacttgcagatagtgaccttcgctgaagttcgcggcggcgtagttatctttcttctcttcgagaatgtgataagccggagaggtggtgtaactcagtaccagatcgctttcaccttttaaaaacaggccgtaggcttcgctccagcctttggtgaccgtgaccgttttcttcgccagtttctgccaggcttgtggggcgtcatcgccatagactttttgcatccatagcaacagacccagccccggtgtactggtgcgcggatcctgataaatcacccgccagttttgatcgctctcaaccagttctttcaggctttgtggcgggtttttcagtttgttcttgtcataaacgaaggcgaagtagccataatcaaacggtacgaaagtgtcattattccagccgccgggaacgttaacggcatccgctgccacaccgcttttggcaaacagtccggttttactggcggcgtctaacaggttgttatccagccccagcaccacatcggctttactgtttttgccttccatccgtagacggttgagaaggctaacgccatcttccagcgccaccagtttcagttcgcaattacagtcggcttcaaaggcttttttaaccaccggaccaggcccccagtcggcggcgaaggaatcgtaggtataaacagtcagaacgggtttagcgaaaacgggcgctgtgcacagcaacagcaggggcagacatttttttaacactttgcacctcaaaaaagagtggcaaaggacttgagaaggagcctcaaatcccttcgccggcgttatccggatcaggttcgacgggtattttctcagcgcacgcgtacgcgtggcaccccgttgagaacggcgttagtgtagtgattttgttatcaaccagcaatcatggatccggtggcgcaaaccacgcacttttaaaatcgaaccagccgagggtattcatgcgcaggccgcgcatactgcgttgcccctgaatgatcagccagtggtgcaataatggcaccatcgctttgctggcgaccagttgctggcaccagttcgccagattcatctcgccattgcgccagcgagcagcgtcggcttgccagtcaatgggaatgcaatgttgtagcagtggcacttcgcataaatgtgcgaaaacagagaagtccagcggcagggtaaagttggcgctgtttagccagatatcactttcgatctctcctgtatgccactgatcgtagtcgatctctttgattttcagcgtgacctggtgacttgccagaatctgctgcatgatcccggcaatcacccgatgctcactgtgatcctgataaaaggttagggtgaggctttccaggccagccggtttttcgctctttatggtgcgggcatggtgccaacgggggagcagtccataagccgggaaccacagttgctggtactgttcctcagcgaaatagaccagattagttggagaaagcacatagcttacccagtccctgacttgctgattcgccccgcgatgggtgcggctgtcgaacagtaaatagtagcaaccttcctccaggcggctttcaatctctttttcctcgccctgtggaccttttagcatcagccctccggctggctcgtcggcaatttccggcagaacccagacgttaacttcgtcgattaatgcccggtaaccgaagaagtcatcgaatgcctgaattttcagttgattggtgctgttgcgaatcaccgcatacggaccggtgccgatgggatggctggcaaagttactgagggtttcccattcgcgcggcaggatcatcgccggaacttgccccagcagtaacggtaaccagcggtccggttgcgtgagatggatatccagcgtccagggcgtcgggctcacaatgtcagcaatatggctatagagcggcagcgtattgattcgttttaaagaggcgatcacatcgtccatttccagttcacgaccatggtgaaaatggactcctggacgcaaaaagaaacgccagtgaagcggactaatttgctgccagtggtgggcgatgtctgcttccagttccccattttcctcatttatgcgcgttaggctactgaagatttgccgggcgatatgggtttcggaacggcgcaatgcgctgccaggtagcagattacgcaacggacgatagtagagcacgcgcaggatgtgccgcccctggcggaagctgcggcccagatgagaaaccagcatttgccgcacagtcgctttgtcgccaaccaactgcaccagttgatcgatacgatcctgctccagcaggtcttccgcccgctgttgctgaagcgccagcccggtatagaggaatgtcagacggctgcgtttaccgcgcccgacttccgcttcccacgtcagccagccgcgatcctgcatggtgttgagcagggtgcgcatatgacgacggctgcagctcaataacgctgccagttcgttgagcgttgtgtcctggcttttaccctcgcagcattgccacaggcggatgaactgttgttgcagacgagcagatggcataaaaggggaactcctgtgcaaaagacagcaattttattttccctatattaagtcaataattcctaacgatgaagcaagggggtgccccatgcgtcagttttatcagcactattttaccgcgacagcgaagttgtgctggttgcgttggttaagcgtcccacaacgattaaccatgcttgaaggactgatgcagtgggatgaccgcaattctgaaagttgacttgcctgcatcatgtgtgactgagtattggtgtaaaatcacccgccagcagattatacctgctggttttttttattctcgccgcgctaaaaagggaacgtatgatctggataatgacgatggctcgccgtatgaacggtgtttacgcggcatttatgctggtcgcttttatgatgggggtggccggggcgctacaggctcctacattgagcttatttctgagtcgtgaggttggcgcgcaacctttctggatcggcctcttttatacggtgaatgctattgctgggatcggcgtaagcctctggttggcaaaacgttctgacagtcagggcgatcggcgaaaactgattatattttgctgtttgatggctatcggcaatgcgctattgtttgcatttaatcgtcattatctgacgcttatcacctgtggtgtgcttctggcatctctggccaatacggcaatgccacagttatttgctctggcgcgggaatatgcggataacagcgcgcgagaagtggtgatgtttagcagcgtgatgcgtgcgcagctttctctggcatgggttatcggtccaccgttggcctttatgctggcgttgaattacggctttacggtgatgtttagcattgccgccgggatattcacactcagtctggtattgattgcatttatgcttccgtctgtggcgcgggtagaactgccgagcgaaaatgctttaagtatgcaaggtggctggcaggatagtaacgtacggatgttatttgtcgccagcacgttaatgcggacctgcaacaccatgtacattattgatatgccgttgtggatcagtagcgagttaggattgccagacaaactggcgggtttcctgatggggacggcagctggactggaaataccagcaatgattctggctggctactatgtcaaacgttatggtaagcggcgaatgatggtcatagcagtggcggcaggagtactgttttacaccggattgattttctttaatagccgtatggcgttgatgacgctgcaactttttaacgctgtatttatcggcattgttgcgggtattgggatgctatggtttcaggatttaatgcctggaagagcgggggcagctaccaccttatttactaacagtatttctaccggggtaattctggctggcgttattcagggagcaattgcacaaagttgggggcactttgctgtctactgggtaattgcggttatttctgttgtcgcattatttttaaccgcaaaggttaaagacgtttgatgacgtggacgatagcggaaagcccggtcatttgaccgggcaaggggattaattcataaacgcaggttgttttgcttcataagcggcaatggcgtcgtcgtgctgcaaggtaagcccaatactgtccagaccgttcatcatgcagtggcggcggaaggcatcgatggtaaagcgataggttttctctcccgctttcacctcttgcgcttccagatccacgtcgaaatggatccccggattagctttcaccagcgcaaacagttcgtccacttctgcatcgcttaatttcaccggcagcagctggttgttaaagctattgccgtagaagatgtcagcaaaactcggcgcaatcaccactttaaaaccgtagtcggtcaatgcccagggcgcgtgctcacggctagagccacagccgaagttttctcgtgccagcaaaatggaagcgccctgatactgcgggaagttcagcacgaagtccgggtttggctgttggcctttttcatccagaaaacgccagtcgttaaacagatgcgcgccaaaacccgtacgggtcactttctgcaaaaactgtttcgggatgattgcatcggtatcgacattggcggcatccagcggaaccaccaggcctgtgtgtttgataaatttctctgccatggtgtgctccttatttaatgttgcgaatgtcggcgaaatgtccggtcacagcagcagcggcagccattgccgggctgaccagatgcgtgcgcccgccgcgcccctggcggccttcaaagttacggttgctggtggaggcacaacgttcgcccggattcagacggtcgttgttcatcgccagacacatactgcagccaggcaagcgccattcaaaaccggcttcaataaagattttatccagaccttccgcttccgcctgggcttttaccgggccagagccgggaaccaccagtgcctgcacgcctggcgcgacttttcgccctttggcgatctccgctgccgcgcgtaaatcttcaatgcggctgttggtacaggaaccgataaacactttgtcgatagccacttcggtcagcggaatacccggtttcagccccatataggccagcgctttttctgcgctcgcgcgttcaaccggatcggcaaagctagccggatcgggaatattgtcgttcacggaaatcacctggccgggattggtgccccaggtgacctgcggactaatttcttctgcttgcagagtgacaacggtatcgaaagttgcgccttcgtcggtttgcagggttttccagtaggcaacggcgtcgtcgaaatctttgcctttcggcgcatgcagacggcctttgacatagttaaaggtggtttcgtccggtgcaaccagaccggcttttgcgcccatttcgattgccatattgcacagggtcatacgaccttccatgcttaaatcacggattgcttcgccgcaaaactccaccacatgcccggtgccgcctgcgctaccggttttaccgataattgccagcacgatatcttttgcggtaatgcccggcgcggctttgccctggacttcaattttcatggtttttgcgcggccctgtttcagggtttgcgttgccagtacgtgttcaacttcggaagtgccgataccaaaggccagtgcgccaaacgcgccgtgggtggcggtatggctgtcgccgcagacaatggtcatccccggcaaggtgacgccctgttccggccccattacgtggacgatcccctgatacgggtgattcaggtcatacagttcgacgccaaattctttgcagtttttgatcagttcctgcatctggatacgcgccatttcaccgcaggcattaatgtctttggtctgggtagagacgttgtgatccatggtagcgaaggttttgcccggctgacgtaccgggcgaccgtgggcgcgcagaccatcgaacgcctgcggactggtcacttcatgcaccaggtggcggtcgatatataacagtggggtttcgttttcggcttcgtacacaacgtgagcgtcgaacaatttttcgtataacgtcttagccatgattacaccccttctgctacatagcgggcaatgatatcgcccatttcatcggtactaacggcggcagcgccacgggctaaatccccggtgcgaatgccttcttctaatgcgcggttaatggcgcgttcaatggcgcaagccgcatcatcggcatccaggctgtaacgcagcagcagtgccaggctaaggatttgtgcaatcgggttggcgatgtttttgcctgcgatatctggtgcgctgccgcccgccggttcatacagtccaaaaccttgctcgttcaggctggcggaaggcaacatccccatgctgccagtgatcattgcgcactcgtcagacagaatgtcgccaaacaggttggagcacagcagaacgtcaaactgacttggatctttaatcagctgcatggtggcgttgtcgatgtacatatgcgccagttcgacatccgggtattccgtggcgatctcgttaacgatctcccgccataaaatagaggattgcagcacgttggctttatcgatgctcgtcactttgtggcgacgcttgcgagcagattcaaacgcgatgcgggcgatacgttcgatctcaaaacggtgatacacctcggtatcaaaggctttttcatattgtccgctaccttcgcggccttttggctgaccgaaatagatgccgccggtcagttcgcgcacacacaggatgtcgaagccgtttgcggcaatgtctgcacgcagcggacagaatgcttccagcccctgatacagttttgccgggcgcaggttgctgaataatttgaagtgcttacgcagaggcagcagcgcgccgcgttctggttgctggtctggtggtaaatgttcccacttcgggccgcctacgctgccaaacagcacggcatcggcttgctcacaaccttcaaccgtcgcaggcggcagtggttgcccgtggttatcaatggctgcgccgcctacatcgtaatggctggtggtgatgcgcatcgcaaagcggttgcgcacggcatccagcactttcagcgcctgggtcatcacttccggaccaataccgtcccccggcaatacggcaatatggtaattcttgctcatcacacggtttccttgttgttttcgttgtgttgagctttgcgttgcaactctttttcgacttctgcggcacgccagatattgttcagaacgtgcaccatggctttggcagaactctcgacaatatcggtagccaggccgacgccgtggaagcggcgaccgttgtagttagcgacgatatccacctgacccagcgcatctttaccgtggcctttggcggtcaggctgtatttcaccagttcgacgttatattcagtgatgcggttaattgcctgatagacggcatcgaccggaccgttaccgttggcggcttctgctttgacttcttcgccacaggccagtttgacggcggcggtggcgatatcgttagagccagactgcacgctgaagtaatccagacggaaatgctccggctcttcttgctgcttaccgatgaaggccagcgcctccagatcgtaatcaaacacctgaccttttttgtccgccagcttcaggaaagcatcgtacaaattgtctaaattatattcactttctttataccccatctcatccatgcgatgtttcaccgccgcacgcccgctacgagaggtcagattcagctggatttggttcagaccaatagattctggtgtcatgatttcgtagttttcgcggtttttcagcacgccatcctggtgtataccggaggagtgtgcgaatgcgccgctgccaacaatggctttgtttgccgggatcggcatattacaaatctggctaactaactggctggtgcgccatatctcctggtgattaatggcggtgtggacgttgagaatatccttacgaactttgatcgccatgatgacttcttccagggaacagtttccggcacgctcgccgatcccgttcattgcgccttccacctggcgtgcaccggcatgtaccgccgccagactgtttccgaccgccaggcccaaatcgtcgtgggtatgtacggagataatggctttgtcgatgttaggcacgcgttcatacaggccgctgatgattccggcgaactcaaacggcatggtgtagcccacggtgtccggaatgttgatggtggtggcaccggcattaatcgccgcttcgaccactcgcgccagatcggcaatgggtgtacgcccggcatcttcgcaagaaaattcaacatcatcggtgtaattacgggcgcgtttcaccatatagatagcgcgttcgatcacctcgtccagcgtgctgcgcagcttggtggcgatgtgcattgggctagtggcaataaaggtatgaatacggaaggcttcggcgactttcagggattcggccgccacgtcgatatctttttccacgcagcgagctaacgcacatacgcggctgtttttaacctggcgggcgatggtttgcacgctttcaaaatcgcccgggctagagacggggaaaccgacttccatcacgtcaacacccatacgctcaagggccagcgcaatttgcagtttttctttcacactcaagcttgcctgtaacgcctgttcaccgtcgcgcaatgtggtatcgaaaataatgacttgctggctcatggtttgggtccttgtctcttttagagcgcctcgcttcgggcataaaaaaacccgcgcaatggcgcgggttttttgtttgactgcgtgctggcttaatgctggatgccgctcactcgtctaccgcgcaaagaagatgcgtttagtagtagtagaccgataaagcgaacgatgtgagtcattaaatcagctccagatgaatgcgatatgcttttagagttactggatacaaaaacggatgtcaaccctgacgcaataaaaacgtcccgccagcgtgagttctgcatccgtaaaattagctaattgtgctgcggtggttaaagtaagcgatattaatttctgcttaactaccgacgcttttcatcggttgacatatttcagcataaatttttgcatctaatcaacgaggaaaaaggggacaaaatgcacgcgttgcaaaacctatcctgatgatttgtattgaattatatgttttgcgattttttttgatattgatttggtgaatattattgatcaattaatgttaagaattaatgcattaaatatataaattaattattaaataagcacatttaatccattttgtagatgattgagtattcgcggtagttatgattagattgttttcgcaacaaaaacattatggattattatgctgtggtaaatgactcattccacggcaatggattctgtttttatcagaacccgtatctttatgttttccgaattttactcattttgctttttcttattttatatgcatgataaatcatattcttcaggattatttctctgcattccaataagggaaagggagttaagtgtgacagtggagttaagtatgccagaggtacaaacagatcatccagagacggcggagttaagcaaaccacagctacgcatggtcgatctcaacttattaaccgttttcgatgccgtgatgcaggagcaaaacattactcgtgccgctcatgttctgggaatgagccaacctgcggtcagtaacgctgttgcacgcctgaaggtgatgtttaatgacgagctttttgttcgttatggccgtggtattcaaccgactgctcgcgcatttcaactttttggtagtgttcgtcaggcattgcaactagtacaaaatgaattgcctggtagtggttttgaacccgcgagcagtgaacgtgtatttcatctttgtgtttgcagcccgttagacagcattctgaccagccagatttataatcacattgagcagattgcgccaaatatacatgttatgttcaagtctagtttaaatcagaacactgaacatcagctgcgttatcaggaaacggagtttgtgattagttatgaagacttccatcgtcctgaatttaccagcgtaccattatttaaagatgaaatggtgctggtagccagcaaaaatcatccaacaattaagggcccgttactgaaacatgatgtttataacgaacaacatgcggcggttagcctcgatcgtttcgcgagttttagtcaaccttggtatgacacggtagataagcaagccagtatcgcgtatcagggcatggcaatgatgagcgtacttagcgtggtgagccaaacgcatttggtcgctattgcgccgcgttggctggctgaagagttcgctgaatccttagaattacaggtattaccgctgccgttaaaacaaaacagcagaacctgttatctctcctggcatgaagctgccgggcgcgataaaggccatcagtggatggaagagcaattagtcagtatttgcaaacgctaactgattgcagaataggtcagacatgaatgtctggtttattctgcattttttattgaatgtagaattttattctgaatgtgtgggctctctattttaggattaattaaaaaaatagagaaattgctgtaagttgtgggattcagccgatttattatcaatttaatcctctgtaatggaggattttatcgtttcttttcacctttcctcctgtttattcttattaccccgtgtttatgtctctggctgccaattgcttaagcaagatcggacggttaatgtgttttacacattttttccgtcaaacagtgaggcaggccatggagatgttgtctggagccgagatggtcgtccgaagccttatcgatcagggcgttaaacaagtattcggttatcccggaggcgcagtccttgatatttatgatgcattgcataccgtgggtggtattgatcatgtattagttcgtcatgagcaggcggcggtgcatatggccgatggcctggcgcgcgcgaccggggaagtcggcgtcgtgctggtaacgagcggtccaggggcgaccaatgcgattactggcatcgccaccgcttatatggattccattccattagttgtcctttccgggcaggtagcgaccagcttgataggttacgatgcctttcaggagtgcgacatggtggggattagccgaccggtggttaaacacagttttctggttaagcaaacggaagacattccgcaggtgctgaaaaaggctttctggctggcggcaagtggtcgcccaggaccagtagtcgttgatttaccgaaagatattcttaatccggcgaacaaattaccctatgtctggccggagagcgtcagtatgcgttcttacaatcccactactaccggacataaagggcaaattaagcgtgctctgcaaacgctggtagcggcaaaaaaaccggttgtctacgtaggcggtggggcaatcacggcgggctgccatcagcagttgaaagaaacggtggaggcgttgaatctgcccgttgtttgcagtttgatggggctgggggcgtttccggcaacgcatcgtcaggcactgggcatgctgggaatgcacggtacctacgaagccaatatgacgatgcataacgcggatgtgattttcgccgtcggggtacgatttgatgaccgaacgacgaacaatctggcaaagtactgcccaaatgccactgttctgcatatcgatattgatcctacttccatttctaaaaccgtgactgcggatatcccgattgtgggggatgctcgccaggtcctcgaacaaatgcttgaactcttgagccaagaatccgcccatcaaccactggatgagatccgcgactggtggcagcaaattgaacagtggcgcgctcgtcagtgcctgaaatatgacactcacagtgaaaagattaaaccgcaggcggtgatcgagactctttggcggttgacgaagggagacgcttacgtgacgtccgatgtcgggcagcaccagatgtttgctgcactttattatccattcgacaaaccgcgtcgctggatcaattccggtggcctcggcacgatgggttttggtttacctgcggcactgggcgtcaaaatggcgttgccagaagaaaccgtggtttgcgtcactggcgacggcagtattcagatgaacatccaggaactgtctaccgcgttgcaatacgagttgcccgtactggtggtgaatctcaataaccgctatctggggatggtgaagcagtggcaggacatgatctattccggccgtcatagtcaatcttatatgcaaagcctacccgatttcgtccgtctggcggaagcctatgggcatgtcgggatccagatttctcatccgcatgagctggaaagcaaacttagcgaggcgctggaacaggtgcgcaataatcgcctggtgtttgttgatgttaccgtcgatggcagcgagcacgtctacccgatgcagattcgcgggggcggaatggatgaaatgtggttaagcaaaacggagagaacctgattatgcgccggatattaagtgtcttactcgaaaatgaaagtggcgcgttatcccgcgtgattggccttttttcccagcgtggctacaacattgaaagcctgaccgttgcgccaaccgacgatccgacattaagccgtatgaccatccagaccgtgggcgatgaaaaagtacttgagcagatcgaaaagcaattacacaaactggtcgatgtcttgcgcgtgagtgagttggggcagggcgcgcatgttgagcgggaaatcatgctggtgaaaattcaggccagcggttacgggcgtgacgaagtgaaacgtaatacggaaatattccgtgggcaaattatcgatgtcacacccagcctttataccgttcaattagcaggcaccagcggtaagcttgatgcatttttagcaagcattcgcgatgtggcgaaaattgtggaggttgctcgctctggtgtggtcggacttagccgcggcgataaaataatgcgttgagaatgatctcaatgcgcaatttacagcccaacatgtcacgttgggctttttttgcgaaatcagtgggaacctggaataaaagcagttgccgcagttaattttctgcgcttagatgttaatgaatttaacccataccagtacaatggctatggtttttacattttacgcaaggggcaattgtgaaactggatgaaatcgctcggctggcgggagtgagccggaccactgcaagctatgttattaacggcaaagcgaagcaataccgtgtgagcgacaaaaccgttgaaaaagtcatggctgtggtgcgtgagcacaattaccacccgaacgccgtggcagctgggcttcgtgctggacgcacacgttctattggtcttgtgatccccgatctggagaacaccagctatacccgcatcgctaactatcttgaacgccaggcgcggcaacggggttatcaactgctgattgcctgcagtgaagatcagccagacaacgaaatgcggtgcattgagcaccttttacagcgtcaggttgatgccattattgttagcacgagcttgcctcctgagcatcctttttatcaacgctgggctaacgacccgttcccgattgtcgcgctggaccgcgccctcgatcgtgaacacttcaccagcgtggttggtgccgatcaggatgatgccgaaatgctggcggaagagttacgtaagtttcccgccgagacggtgctttatcttggtgcgctaccggagctttctgtcagcttcctgcgtgaacaaggtttccgtactgcctggaaagatgatccgcgcgaagtgcatttcctgtatgccaacagctatgagcgggaggcggctgcccagttattcgaaaaatggctggaaacgcatccgatgccgcaggcgctgttcacaacgagctttgcgttgttgcaaggagtgatggatgtcacgctgcgtcgcgacggcaaactgccttctgacctggcaattgccacctttggcgataacgaactgctcgacttcttacagtgtccggtgctggcagtggctcaacgtcaccgcgatgtcgcagagcgtgtgctggagattgtcctggcaagcctggacgaaccgcgtaagccaaaacctggtttaacgcgcattaaacgtaatctctatcgccgcggcgtgctcagccgtagctaagccgcgaacaaaaatacgcgccaggtgaatttccctctggcgcgtagagtacgggactggacatcaatatgcttaaagtaaataagactattcctgactattattgataaatgcttttaaacccgcccgttaattaactcaccagctgaaattcacaataattaagtgatatcgacagcgcgtttttgcattattttgttacatgcggcgatgaattgccgatttaacaaacacttttctttgcttttgcgcaaacccgctggcatcaagcgccacacagacgtaacaaggactgttaaccggggaagatatgtcctaaaatgccgctcgcgtcgcaaactgacactttatatttgctgtggaaaatagtgagtcattttaaaacggtgatgacgatgagggattttttcttacagctattcataacgttaatttgcttcgcacgttggacgtaaaataaacaacgctgatattagccgtaaacatcgggttttttacctcggtatgccttgtgactggcttgacaagcttttcctcagctccgtaaactcctttcagtgggaaattgtggggcaaagtgggaataaggggtgaggctggcatgttccggggagcaacgttagtcaatctcgacagcaaagggcgcttaagtgtgcctacccgttatcgggaacagctgcttgagaacgctgccggtcaaatggtttgcaccattgacatttatcacccgtgcctgctgctttaccccctgcctgaatgggaaattatcgagcaaaaattaagccgtctgagcagcatgaacccggttgagcgccgtgtgcagcgcctactgttaggtcatgccagcgaatgtcagatggatggcgcaggtcgattgttaatcgcgccagtactgcggcaacatgccgggctgacaaaagaagtgatgctggttggacagttcaacaagtttgagctgtgggatgaaacaacctggcatcaacaggtcaaggaagatatcgacgcagagcagttggctaccggagacttaagcgagcgactgcaggacttgtctctataaaatgatggaaaactataaacatactacggtgctgctggatgaagccgttaatggcctcaatatccgtcctgatggcatctacattgatgggacttttggtcgcggtggtcacagtcgtctgatcctcagccagcttggcgaagaggggcgtttgctggcgatcgatcgcgacccgcaggctatcgccgttgcgaagactattgatgatccgcgcttctccatcatccacggacctttctccgcgctgggcgaatacgttgccgagcgcgatcttatcggcaagatcgacggcattctcctcgatcttggcgtctctagtccgcaacttgatgatgctgaacgtggcttttcctttatgcgcgatggtccgctggacatgcgtatggacccaacccgtgggcagagtgccgctgaatggctacaaaccgcagaagaagccgatatcgcctgggtattgaaaacctatggtgaagagcgttttgccaaacgcattgcccgcgccattgtcgagcgtaaccgcgaacagccgatgacccgcaccaaagaactggcggaagtcgtggctgctgcaacgccggtgaaagataagtttaaacatcccgcgacccgtaccttccaggcggtgcgcatttgggtaaacagtgaactggaggagatagagcaggcgctaaaaagcagcctcaacgtgctggccccgggtgggcggcttagcatcatcagcttccacagcctggaagaccgtattgtgaaacgttttatgcgtgaaaacagccgcggtccgcaagttccggcagggttaccgatgactgaagagcagctcaaaaaactgggtggccgtcagctgcgagcactaggcaagttaatgccgggcgaagaagaggtggctgagaaccctcgtgcccgtagtagtgttctgcgtattgcagagaggacgaatgcatgatcagcagagtgacagaagctctaagcaaagttaaaggaagcatgggaagccacgagcgccatgcattgcctggtgttatcggtgacgatcttttgcgatttgggaagctgccactctgcctgttcatttgcattattttgacggcggtgactgtggtaaccacggcgcaccatacccgtttactgaccgctcagcgcgaacaactggtgctggagcgagatgctttagacattgaatggcgcaacctgatccttgaagagaatgcgctcggcgaccatagccgggtggaaaggatcgccacggaaaagctgcaaatgcagcatgttgatccgagtcaagaaaatatcgtagtgcaaaaataaggataaacgcgacgcatgaaagcagcggcgaaaacgcagaaaccaaaacgtcaggaagaacatgccaactttatcagttggcgttttgcgttgttatgcggctgtattctcctggcgctggcttttctgctcggacgcgtagcgtggttacaagttatctccccggatatgctggtgaaagagggcgacatgcgttctcttcgcgttcagcaagtttccacctcccgcggcatgattactgaccgttctggtcgcccgttagcggtgagcgtgccggtaaaagcgatttgggctgacccgaaagaagtgcatgacgctggcggtatcagcgtcggtgaccgctggaaggcgctggctaacgcgctcaatattccgctggatcagcttagtgcccgcattaacgccaacccgaaagggcgctttatttatctggcgcgtcaggtgaaccctgacatggcggactacatcaaaaaactgaaactgccggggattcatctgcgtgaagagtctcgccgttactatccgtccggcgaagtgactgctcacctcatcggctttactaacgtcgatagtcaagggattgagggcgttgagaagagtttcgataaatggcttaccgggcagccgggtgagcgcattgtgcgtaaagaccgctatggtcgcgtaattgaagatatttcttctactgacagccaggcagcgcacaacctggcgctgagtattgatgaacgcctgcaggcgctggtttatcgcgaactgaacaacgcggtggcctttaacaaggctgaatctggtagcgccgtgctggtggatgtcaacaccggtgaagtgctggcgatggctaacagcccgagttacaaccctaacaatctgagcggcacgccgaaagaggcgatgcgtaaccgtaccatcaccgacgtgtttgaaccgggcagtacggttaaaccgatggtggtaatgaccgcgttgcaacgtggcgtggtgcgggaaaacagcgtactcaataccattccttatcgaattaacggccacgaaatcaaagacgtggcacgctacagcgaattaaccctgaccggggtattacagaagagcagtaacgtcggtgtttccaagctggcgttagcgatgccgtccagtgcgttagtagatacttacagtcgttttggactgggaaaagcgaccaatttggggttggtcggagaacgcagtggcttatatcctcaaaaacaacggtggtctgacatagagagggccaccttctctttcggctacgggctaatggtaacaccattacagttagcgcgagtctacgcaactatcggcagctacggcatttatcgcccactgagcattaccaaagttgaccccccggttcccggtgaacgtgtcttcccggaatccattgtccgcactgtggtgcatatgatggaaagcgtggcgctaccaggcggcggcggcgtgaaggcggcgattaaaggctatcgtatcgccattaaaaccggtaccgcgaaaaaggtcgggccggacggtcgctacatcaataaatatattgcttataccgcaggcgttgcgcctgcgagtcagccgcgcttcgcgctggttgttgttatcaacgatccgcaggcgggtaaatactacggcggcgccgtttccgcgccggtctttggtgccatcatgggcggcgtattgcgtaccatgaacatcgagccggatgcgctgacaacgggcgataaaaatgaatttgtgattaatcaaggcgaggggacaggtggcagaagctaaagcctgagcgcttcgcgctggttgttgttatcaacgatccgcaggcgggtaaatactacggcggcgccgtttccgcgccggtctttggtgccatcatgggcggcgtattgcgtaccatgaacatcgagccggatgcgctgacaacgggcgataaaaatgaatttgtgattaatcaaggcgaggggacaggtggcagatcgtaatttgcgcgaccttcttgctccgtgggtgccagacgcacctagccgagcactgcgagagatgacactcgacagccgtgtggctgcggcgggcgatctctttgtagctgtagtaggtcatcaggcggacgggcgtcgatatatcccgcaggcgatagcgcaaggtgtggctgccattattgcagaggcgaaagatgaggcgaccgatggtgaaatccgtgaaatgcacggcgtaccggtcatctatctcagccagctcaacgagcgtttatctgcactggcgggccgcttttaccatgaaccctctgacaatttacgtctcgtgggcgtaacgggcaccaacggcaaaaccacgactacccagctgttggcgcagtggagccaactgcttggcgaaatcagcgcggtaatgggcaccgttggtaacggcctgctggggaaagtgatcccgacagaaaatacaaccggtagcgcagtcgatgttcagcatgagctggcggggctggtggatcagggcgcgacgttttgcgcaatggaagtttcctcccacgggctggtacagcaccgtgtggcggcattgaaatttgcggcgagcgtctttaccaacttaagccgcgatcaccttgattatcatggtgatatggaacactacgaagccgcgaaatggctgctttattctgagcatcattgcggtcaggcgattattaacgccgacgatgaagtgggccgccgctggctggcaaaactgccggacgcggttgcggtaagtatggaagatcatattaatccgaactgtcacggacgctggttgaaagcgaccgaagtgaactatcacgacagcggtgcgacgattcgctttagcagtagttggggcgatggcgaaattgaaagccatctgatgggcgcttttaacgtcagcaacctgctgctcgcgctggcgacactgttggcactcggctatccactggctgatctgctgaaaaccgccgcgcgtctgcaaccggtttgcggacgtatggaagtgttcactgcgccaggcaaaccgacggtggtggtggattacgcgcatacgccggatgcactggaaaaagccttacaggcggcgcgtctgcactgtgcgggcaagctgtggtgtgtctttggctgtggtggcgatcgcgataaaggtaagcgtccactgatgggcgcaattgccgaagagtttgctgacgtggcggtggtgacggacgataacccgcgtaccgaagaaccgcgtgccatcatcaacgatattctggcgggaatgttagatgccggacatgccaaagtgatggaaggccgtgctgaagcggtgacttgcgccgttatgcaggctaaagagaatgatgtggtactggtcgcgggcaaaggccatgaagattaccagattgttggcaatcagcgtctggactactccgatcgcgtcacggtggcgcgtctgctgggggtgattgcatgattagcgtaacccttagccaacttaccgacattctcaacggtgaactgcaaggtgcagatatcacccttgatgctgtaaccactgatacccgaaaactgacgccgggctgcctgtttgttgccctgaaaggcgaacgttttgatgcccacgattttgccgaccaggcgaaagctggcggcgcaggcgcactactggttagccgtccgctggacatcgacctgccgcagttaatcgtcaaggatacgcgtctggcgtttggtgaactggctgcatgggttcgccagcaagttccggcgcgcgtggttgctctgacggggtcctccggcaaaacctccgttaaagagatgacggcggcgattttaagccagtgcggcaacacgctttatacggcaggcaatctcaacaacgacatcggtgtaccgatgacgctgttgcgcttaacgccggaatacgattacgcagttattgaacttggcgcgaaccatcagggcgaaatagcctggactgtgagtctgactcgcccggaagctgcgctggtcaacaacctggcagcggcgcatctggaaggttttggcagccttgcgggtgtcgcgaaagcgaaaggtgaaatctttagcggcctgccggaaaacggtatcgccattatgaacgccgacaacaacgactggctgaactggcagagcgtaattggcagtcgcaaagtgtggcgtttcagtcccaatgccgccaacagcgatttcaccgccaccaatatccatgtgaccagccacggtacggaatttaccctacaaaccccaaccggtagcgtcgatgttctgctgccgttgccggggcgtcacaatattgcgaatgcgctggcagccgctgcgctctccatgtccgtgggcgcaacgcttgatgctatcaaagcggggctggcaaatctgaaagctgttccaggccgtctgttccccatccaactggcagaaaaccagttgctgctcgacgactcctacaacgccaatgtcggtagtatgactgcagcagtccaggtactggctgaaatgccgggctaccgcgtgctggtggtgggcgatatggcggaactgggcgctgaaagcgaagcctgccatgtacaggtgggcgaggcggcaaaagctgctggtattgaccgcgtgttaagcgtgggtaaacaaagccatgctatcagcaccgccagcggcgttggcgaacattttgctgataaaactgcgttaattacgcgtcttaaattactgattgctgagcaacaggtaattacgattttagttaagggtagtcgtagtgccgccatggaagaggtagtacgcgctttacaggagaatgggacatgttaatataagctttacaggagaatgggacatgttagtttggctggccgaacatttggtcaaatattattccggctttaacgtcttttcctatctgacgtttcgcgccatcgtcagcctgctgaccgcgctgttcatcagtttgtggatgggcccgcgtatgattgctcatttgcaaaaactttcctttggtcaggtggtgcgtaacgacggtcctgaaagtcacttcagcaagcgcggtacgccgaccatgggcgggattatgatcctgacggcgattgtgatctccgtactgctgtgggcttacccgtccaatccgtacgtctggtgcgtgttggtggtgctggtaggttacggtgttattggctttgttgatgattatcgcaaagtggtgcgtaaagacaccaaagggttgatcgctcgttggaagtatttctggatgagcgtcattgcgctgggtgtcgccttcgccctgtaccttgccggcaaagacacgcccgcaacgcagctggtggtcccattctttaaagatgtgatgccgcagctggggctgttctacattctgctggcttacttcgtcattgtgggtactggcaacgcggtaaacctgaccgatggtctcgacggcctggcaattatgccgaccgtatttgtcgccggtggttttgcgctggtggcgtgggcgaccggcaatatgaactttgccagctacttgcatataccgtatctgcgacacgccggggaactggttattgtctgtaccgcgatagtcggggcaggactgggcttcctgtggtttaacacctatccggcgcaggtctttatgggcgatgtaggtagcctggcgttaggtggtgcgttaggcattatcgccgtactgctacgtcaggaattcctgctggtgattatggggggcgtgttcgtggtagaaacgctttctgtcatcctgcaggtcggctcctttaaactgcgcggacaacgtattttccgcatggcaccgattcatcaccactatgaactgaaaggctggccggaaccgcgcgtcattgtgcgtttctggattattagcctgatgctggttctgattggtctggcaacgctgaaggtacgttaatcatggctgattatcagggtaaaaatgtcgtcattatcggcctgggcctcaccgggctttcctgcgtggactttttcctcgctcgcggtgtgacgccgcgcgttatggatacgcgtatgacaccgcctggcctggataaattacccgaagccgtagaacgccacacgggcagtctgaatgatgaatggctgatggcggcagatctgattgtcgccagtcccggtattgcactggcgcatccatccttaagcgctgccgctgatgccggaatcgaaatcgttggcgatatcgagctgttctgtcgcgaagcacaagcaccgattgtggcgattaccggttctaacggcaaaagcacggtcaccacgctagtgggtgaaatggcgaaagcggcgggggttaacgttggtgtgggtggcaatattggcctgcctgcgttgatgctactggatgatgagtgtgaactgtacgtgctggaactgagcagcttccagctggaaaccacctccagcttacaggcggtagcagcgaccattctgaacgtgactgaagatcatatggatcgctatccgtttggtttacaacagtatcgtgcagcaaaactgcgcatttacgaaaacgcgaaagtttgcgtggttaatgctgatgatgccttaacaatgccgattcgcggtgcggatgaacgctgcgtcagctttggcgtcaacatgggtgactatcacctgaatcatcagcagggcgaaacctggctgcgggttaaaggcgagaaagtgctgaatgtgaaagagatgaaactttccgggcagcataactacaccaatgcgctggcggcgctggcgctggcagatgctgcagggttaccgcgtgccagcagcctgaaagcgttaaccacattcactggtctgccgcatcgctttgaagttgtgctggagcataacggcgtacgttggattaacgatagcaaagcgaccaacgtcggcagtacggaagcggcgctgaatggcctgcacgtagacggcacactgcatttgttgctgggtggcgatggtaaaagcgcggactttagcccactggcgcgttacctgaatggcgataacgtacgtctgtattgtttcggtcgtgacggcgcgcagctggcggcgctacgtccggaagtggcagaacaaaccgaaactatggaacaggcgatgcgcttgctggctccgcgtgttcagccgggcgatatggttctgctctccccagcctgtgccagccttgatcagttcaagaactttgaacaacgaggcaatgagtttgcccgtctggcgaaggagttaggttgatgcgtttatctctccctcgcctgaaaatgccgcgcctgccaggattcagtatcctggtctggatctccacggcgctaaagggctgggtgatgggcagccgggaaaaagataccgacagcctgatcatgtacgatcgcaccttactgtggctgaccttcggcctcgcggcgattggctttatcatggtgaccagcgcgagtatgcccatagggcaacgcttaaccaacgatccgttcttcttcgcgaagcgtgatggtgtctatctgattttggcgtttattctggcgatcattacgctgcgtctgccgatggagttctggcaacgctacagtgccacgatgctgctcggatctatcatcctgctgatgatcgtcctggtagtgggtagcagcgttaaaggggcaagccgttggatcgatctcggtttgctgcgtatccagcctgcggagctgacaaaactgagcctgttttgctatatcgccaactatctggtgcgtaaaggcgacgaagtacgtaataacctgcgcggcttcctgaaaccgatgggcgtgattctggtgttggcagtgttactgctggcacagccagaccttggtacggtggtggtgttgtttgtgactacgctggcgatgttgttcctggcgggagcgaaattgtggcagttcattgccattatcggtatgggcattagtgcggttgtgttgctgatactcgccgaaccgtaccgtatccgccgtgttaccgcattctggaacccgtgggaagatccctttggcagcggctatcagttaacgcaaagcctgatggcgtttggtcgcggcgaactttgggggcaaggtttaggtaacagcgtacaaaaactggagtatctgccggaagcgcacactgactttattttcgccattatcggcgaagaactggggtatgtcggtgtggtgctggcacttttaatggtattcttcgtcgcttttcgcgcgatgagcattggccgtaaagcattagaaattgaccaccgtttttccggttttctcgcctgttctattggcatctggtttagcttccaggcgctggttaacgtaggcgcggcggcggggatgttaccgaccaaaggtctgacattgccgctgatcagttacggtggtagcagcttactgattatgagcacagccatcatgatgctgttgcgtattgattatgaaacgcgtctggagaaagcgcaggcgtttgtacgaggtagtcgatgagtggtcaaggaaagcgattaatggtgatggcaggcggaaccggtggacatgtattcccgggactggcggttgcgcaccatctaatggctcagggttggcaagttcgctggctggggactgccgaccgtatggaagcggacttagtgccaaaacatggcatcgaaattgatttcattcgtatctctggtctgcgtggaaaaggtataaaagcactgatagctgccccgctgcgtatcttcaacgcctggcgtcaggcgcgggcgattatgaaagcgtacaaacctgacgtggtgctcggtatgggaggctacgtgagtggtccaggtggtctggccgcgtggagcttaggcattccggttgtacttcatgaacaaaacggtattgcgggcttaaccaataaatggctggcgaagattgccaccaaagtgatgcaggcgtttccaggtgctttccctaatgcggaagtagtgggtaacccggtgcgtaccgatgtgttggcgctgccgttgccgcagcaacgtttggctggacgtgaaggtccggttcgtgtgctggtagtgggtggttctcagggcgcacgcattcttaaccagacaatgccgcaggttgctgcgaaactgggtgatagtgtcactatctggcatcagagcggcaaaggtagccaacaatccgttgaacaggcgtatgccgaagcggggcaaccgcagcataaagtgacggaatttattgatgatatggcggcggcgtatgcgtgggcggatgtcgtcgtttgccgctccggtgcgttaacggtgagtgaaatcgccgcggcaggactaccggcgttgtttgtgccgtttcaacataaagaccgccagcaatactggaatgcgctaccgctggaaaaagcgggcgcagccaaaattatcgagcagccacagcttagcgtggatgctgtcgccaacaccctggccgggtggagccgagaaaccttattaaccatggcagaacgcgcccgcgctgcatccattccggatgccaccgagcgagtggcaaatgaagtgagccgggttgcccgggcgtaattgtagcgatgccttttgcatcgtatgaatttaagaagttaatggcgtaaagaatgaatacacaacaattggcaaaactgcgttccatcgtgcccgaaatgcgtcgcgttcggcacatacattttgtcggcattggtggtgccggtatgggcggtattgccgaagttctggccaatgaaggttatcagatcagtggttccgatttagcgccaaatccggtcacgcagcagttaatgaatctgggtgcgacgatttatttcaaccatcgcccggaaaacgtacgtgatgccagcgtggtcgttgtttccagcgcgatttctgccgataacccggaaattgtcgccgctcatgaagcgcgtattccggtgatccgtcgtgccgaaatgctggctgagttaatgcgttttcgtcatggcatcgccattgccggaacgcacggcaaaacgacaaccaccgcgatggtttccagcatctacgcagaagcggggctcgacccaaccttcgttaacggcgggctggtaaaagcggcgggggttcatgcgcgtttggggcatggtcggtacctgattgccgaagcagatgagagtgatgcaagcttcctgcatctgcaaccgatggtggcgattgtcaccaatatcgaagccgaccacatggatacctaccagggcgactttgagaatttaaaacagacttttattaattttctgcacaacctgccgttttacggtcgtgcggtgatgtgtgttgatgatccggtgatccgcgaattgttaccgcgagtggggcgtcagaccacgacttacggcttcagcgaagatgccgacgtgcgtgtagaagattatcagcagattggcccgcaggggcactttacgctgctgcgccaggacaaagagccgatgcgcgtcaccctgaatgcgccaggtcgtcataacgcgctgaacgccgcagctgcggttgcggttgctacggaagagggcattgacgacgaggctattttgcgggcgcttgaaagcttccaggggactggtcgccgttttgatttcctcggtgaattcccgctggagccagtgaatggtaaaagcggtacggcaatgctggtcgatgactacggccaccacccgacggaagtggacgccaccattaaagcggcgcgcgcaggctggccggataaaaacctggtaatgctgtttcagccgcaccgttttacccgtacgcgcgacctgtatgatgatttcgccaatgtgctgacgcaggttgataccctgttgatgctggaagtgtatccggctggcgaagcgccaattccgggagcggacagccgtagcctgtgtcgcacaattcgtggacgtgggaaaattgatcccattctggtgccggatccggcgcgggtagccgagatgctggcaccggtattaaccggtaacgacctgattctcgttcagggggctggtaatattggaaaaattgcccgttctttagctgaaatcaaactgaagccgcaaactccggaggaagaacaacatgactgataaaatcgcggtcctgttgggtgggacctccgctgagcgggaagtttctctgaattctggcgcagcggtgttagccggactgcgtgaaggcggtattgacgcgtatcctgtcgacccgaaagaagtcgacgtgacgcaactgaagagcatgggctttcagaaagtgtttatcgcgctacacggtcgcggcggtgaagatggtacgctgcaggggatgctcgagctgatgggcttgccttataccggaagcggagtgatggcatctgcgcttagtatggataaactacgcagcaaacttctatggcaaggtgccggtttaccggtcgcgccgtgggtagcgttaacccgcgcagagtttgaaaaaggcctgagcgataagcagttagcagaaatttctgctctgggtttgccggttatcgttaagccgagccgcgaaggttccagtgtgggaatgagtaaagtagtagcagaaaatgctctacaagatgcattaagattggcatttcagcacgatgaagaagtattgattgaaaaatggctaagtgggccggagttcacggttgcgatactcggtgaagaaattttaccgagtatacgtattcaaccgtccggaaccttctatgattatgaggcgaagtatctctctgatgagacacagtatttctgccccgcaggtctggaagcgagtcaagaggccaatttgcaggcattagtgctgaaagcatggacgacgttaggttgcaaaggatggggacgtattgacgttatgctggacagcgatggacagttttatctgctggaagccaataccagtccgggtatgaccagccacagcctggtgccgatggcggcacgtcaggcaggtatgagcttcagccagttggtagtacgaattctggaactggcggactaatatgagccaggctgctctgaacacgcgaaacagcgaagaagaggtttcttctcgccgcaataatggaacgcgtctggcggggatccttttcctgctgaccgttttaacgacagtgttggtgagcggctgggtcgtgttgggctggatggaagatgcgcaacgcctgccgctcagtaagctggtgttgaccggtgaacgccattacacacgtaatgacgatatccggcagagcatcctggcattgggtgagccgggtacctttatgacccaggatgtcaacatcatccagacgcaaatagaacaacgcctgccgtggattaagcaggtgagcgtcagaaagcagtggcctgatgaattgaagattcatctggttgaatatgtgccgattgcgcggtggaatgatcaacatatggtagacgcggaaggaaataccttcagcgtgccgccagaacgcaccagcaagcaggtgcttccaatgctgtatggcccggaaggcagcgccaatgaagtgttgcagggctatcgcgaaatggggcagatgctggcaaaggacagatttactctgaaggaagcggcgatgaccgcgcggcgttcctggcagttgacgctgaataacgatattaagctcaatcttggccggggcgatacgatgaaacgtttggctcgctttgtagaactttatccggttttacagcagcaggcgcaaaccgatggcaaacggattagctacgttgatttgcgttatgactctggagcggcagtaggctgggcgcccttgccgccagaggaatctactcagcaacaaaatcaggcacaggcagaacaacaatgatcaaggcgacggacagaaaactggtagtaggactggagattggtaccgcgaaggttgccgctttagtaggggaagttctgcccgacggtatggtcaatatcattggcgtgggcagctgcccgagccgtggtatggataaaggcggggtgaacgacctcgaatccgtggtcaagtgcgtacaacgcgccattgaccaggcagaattgatggcagattgtcagatctctagcgtatatctggcgctttctggtaagcacatcagctgccagaatgaaattggtatggtgcctatttctgaagaagaagtgacgcaagaagatgtggaaaacgtcgtccataccgcgaaaagcgtgcgtgtgcgcgatgagcatcgtgtgctgcatgtgatcccgcaagagtatgcgattgactatcaggaagggatcaagaatccggtaggacttagcggcgtgcggatgcaggcaaaagtgcacctgatcacatgtcacaacgatatggcgaaaaacatcgtcaaagcggttgaacgttgtgggctgaaagttgaccaactgatatttgccggactggcaagtagttatagcgtattgacggaagatgaacgtgaactgggtgtctgcgtcgtcgatatcggtggtggtacaatggatatcgccgtttataccggtggggcattgcgccacactaaggtaattccttatgctggcaatgtcgtgaccagtgatatcgcttacgcctttggcacgccgccaagcgacgccgaagcgattaaagttcgccacggttgtgcgctgggttccatcgttggaaaagatgagagcgtggaagtgccgagcgtaggtggtcgtccgccacggagtctgcaacgtcagacactggcagaggtgatcgagccgcgctataccgagctgctcaacctggtcaacgaagagatattgcagttgcaggaaaagcttcgccaacaaggggttaaacatcacctggcggcaggcattgtattaaccggtggcgcagcgcagatcgaaggtcttgcagcctgtgctcagcgcgtgtttcatacgcaagtgcgtatcggcgcgccgctgaacattaccggtttaacggattatgctcaggagccgtattatagcacggcggtgggattgcttcactatgggaaagagagtcatcttaacggtgaagctgaagtagaaaaacgtgttacagcaagtgttggcagctggatcaagcgactcaatagttggctgcgaaaagagttttaatttttatgaggccgacgatgattacggcctcaggcgacaggcacaaatcggagagaaactatgtttgaaccaatggaacttaccaatgacgcggtgattaaagtcatcggcgtcggcggcggcggcggtaatgctgttgaacacatggtgcgcgagcgcattgaaggtgttgaattcttcgcggtaaataccgatgcacaagcgctgcgtaaaacagcggttggacagacgattcaaatcggtagcggtatcaccaaaggactgggcgctggcgctaatccagaagttggccgcaatgcggctgatgaggatcgcgatgcattgcgtgcggcgctggaaggtgcagacatggtctttattgctgcgggtatgggtggtggtaccggtacaggtgcagcaccagtcgtcgctgaagtggcaaaagatttgggtatcctgaccgttgctgtcgtcactaagcctttcaactttgaaggcaagaagcgtatggcattcgcggagcaggggatcactgaactgtccaagcatgtggactctctgatcactatcccgaacgacaaactgctgaaagttctgggccgcggtatctccctgctggatgcgtttggcgcagcgaacgatgtactgaaaggcgctgtgcaaggtatcgctgaactgattactcgtccgggtttgatgaacgtggactttgcagacgtacgcaccgtaatgtctgagatgggctacgcaatgatgggttctggcgtggcgagcggtgaagaccgtgcggaagaagctgctgaaatggctatctcttctccgctgctggaagatatcgacctgtctggcgcgcgcggcgtgctggttaacatcacggcgggcttcgacctgcgtctggatgagttcgaaacggtaggtaacaccatccgtgcatttgcttccgacaacgcgactgtggttatcggtacttctcttgacccggatatgaatgacgagctgcgcgtaaccgttgttgcgacaggtatcggcatggacaaacgtcctgaaatcactctggtgaccaataagcaggttcagcagccagtgatggatcgctaccagcagcatgggatggctccgctgacccaggagcagaagccggttgctaaagtcgtgaatgacaatgcgccgcaaactgcgaaagagccggattatctggatatcccagcattcctgcgtaagcaagctgattaagaattgactggaatttgggtttcgaggctctttgtgctaaactggcccgccgaatgtatagtacacttcggttggataggtaatttggcgagataatacgatgatcaaacaaaggacacttaaacgtatcgttcaggcgacgggtgtcggtttacataccggcaagaaagtcaccctgacgttacgccctgcgccggccaacaccggggtcatctatcgtcgcaccgacttgaatccaccggtagatttcccggccgatgccaaatctgtgcgtgataccatgctctgtacgtgtctggtcaacgagcatgatgtacggattagtaccgtagagcacctcaatgctgctctcgcgggcttgggcatcgataacattgttatcgaagttaacgcgccggaaatcccgatcatggacggcagcgccgctccgtttgtatacctgctgcttgacgccggtatcgacgagttgaactgcgccaaaaaatttgttcgcatcaaagagactgttcgtgtcgaagatggcgataagtgggctgaatttaagccgtacaatggttttagcctggatttcaccatcgattttaaccatccggctattgattccagcaaccagcgctatgcgatgaacttctccgctgatgcgtttatgcgccagatcagccgtgcgcgtacgttcggtttcatgcgtgatatcgaatatctgcagtcccgtggtttgtgcctgggcggcagcttcgattgtgccatcgttgttgacgattatcgcgtactgaacgaagacggcctgcgttttgaagacgaatttgtgcgtcacaaaatgctcgatgcgatcggtgacttgttcatgtgtggtcacaatattattggtgcatttaccgcttataaatccggtcatgcactgaataacaaactgctgcaggctgtcctggcgaaacaggaagcctgggaatatgtgaccttccaggacgacgcagaactgccgttggccttcaaagcgcctagtgctgtactggcataacgacatttatactgtcgtataaaattcgactggcaaatctggcactctctccggccaggtgaaccagtcgtttttttttgaattttataagagctataaaaaacggtgcgaacgctgttttcttaagcacttttccgcacaacttatcttcattcgtgctgtggactgcaggctttaatgataagatttgtgcgctaaatacgtttgaatatgatcgggatggcaataacgtgagtggaatactgacgcgctggcgacagtttggtaaacgctacttctggccgcatctcttattagggatggttgcggcgagtttaggtttgcctgcgctcagcaacgccgccgaaccaaacgcgcccgcaaaagcgacaacccgcaaccacgagcctagtgccaaagttaactttggtcaattggccttgctggaagcgaacacacgccgcccgaatagcaactattccgttgattactggcatcaacatgccattcgcacggtaatccgtcatctttctttcgcaatggcaccgcaaacactgcccgttgctgaagaatctttgcctcttcaggcgcaacatcttgcattactggatacgctcagcgcgctgctgacccaggaaggcacgccgtctgaaaagggttatcgcattgattatgcgcattttaccccacaagcaaaattcagcacgcccgtctggataagccaggcgcaaggcatccgtgctggccctcaacgcctcacctaacaacaataaacctttacttcattttattaactccgcaacgcggggcgtttgagattttattatgctaatcaaattgttaactaaagttttcggtagtcgtaacgatcgcaccctgcgccggatgcgcaaagtggtcaacatcatcaatgccatggaaccggagatggaaaaactctccgacgaagaactgaaagggaaaaccgcagagtttcgtgcacgtctggaaaaaggcgaagtgctggaaaatctgatcccggaagctttcgccgtggtacgtgaggcaagtaagcgcgtctttggtatgcgtcacttcgacgttcagttactcggcggtatggttcttaacgaacgctgcatcgccgaaatgcgtaccggtgaaggaaaaaccctgaccgcaacgctgcctgcttacctgaacgcactaaccggtaaaggcgtgcacgtagttaccgtcaacgactacctggcgcaacgtgacgccgaaaacaaccgtccgctgtttgaattccttggcctgactgtcggtatcaacctgccgggcatgccagcaccggcaaagcgcgaagcttacgcagctgacatcacttacggtacgaacaacgaatacggctttgactacctgcgcgacaacatggcgttcagccctgaagaacgtgtacagcgtaaactgcactatgcgctggtggacgaagtggactccatcctgatcgatgaagcgcgtacaccgctgatcatttccggcccggcagaagacagcagcgaaatgtataaacgcgtgaataaaattattccgcacctgatccgtcaggaaaaagaagactccgaaaccttccagggcgaaggccacttcagcgtggacgaaaaatctcgccaggtgaacctgaccgaacgtggtctggtgctgattgaagaactgctggtgaaagagggcatcatggatgaaggggagtctctgtactctccggccaacatcatgctgatgcaccacgtaacggcggcgctgcgcgctcatgcgctgtttacccgtgacgtcgactacatcgttaaagatggtgaagttatcatcgttgacgaacacaccggtcgtaccatgcagggccgtcgctggtccgatggtctgcaccaggctgtggaagcgaaagaaggtgtgcagatccagaacgaaaaccaaacgctggctagcatcaccttccagaactacttccgtctgtatgaaaaactggcggggatgaccggtactgctgataccgaagctttcgaatttagcagtatctacaagctggataccgtcgttgttccgaccaaccgtccaatgattcgtaaagatctgccggacctggtctacatgactgaagcggaaaaaattcaggcgatcattgaagatatcaaagaacgtactgcgaaaggccagccggtgctggtgggtactatctccatcgaaaaaagcgagctggtgagtaacgaactgaccaaagccggtattaagcacaacgtcctgaacgccaaattccacgccaacgaagcggcgattgttgctcaggcaggttatccggctgcggtgactatcgcgaccaatatggcgggtcgtggtacagatattgtgctcggtggtagctggcaggcagaagttgccgcgctggaaaatccgaccgcagagcaaattgaaaaaattaaagccgactggcaggtacgtcacgatgcggtactggaagcaggtggcctgcatatcatcggtaccgagcgtcacgaatcccgtcgtatcgataaccagttgcgcggtcgttctggtcgtcagggggatgctggttcttcccgtttctacctgagcatggaagatgcgctgatgcgtatttttgcttccgaccgagtatccggcatgatgcgtaaactgggtatgaagccaggcgaagccattgaacacccgtgggtgactaaagcgattgccaacgcccagcgtaaagttgaaagccgtaacttcgacattcgtaagcaactgctggaatatgatgacgtggctaacgatcagcgtcgcgccatttactcccagcgtaacgaactgttggatgtcagcgatgtgagcgaaaccattaacagcattcgtgaagatgtgttcaaagcgaccattgatgcctacattccaccacagagcctggaagaaatgtgggatattccggggctgcaggaacgtctgaagaacgatttcgacctcgatttgccaattgccgagtggctggataaagaaccagaactgcatgaagagacgctgcgtgagcgcattctggcgcagtccatcgaagtgtatcagcgtaaagaagaagtggttggtgctgagatgatgcgtcacttcgagaaaggcgtcatgctgcaaacgcttgactccctgtggaaagagcacctggcagcgatggactatctgcgtcagggtatccacctgcgtggctacgcacagaaagatccgaagcaggaatacaaacgtgaaagcttctccatgtttgcagcgatgctggagagcttgaaatatgaagttatcagtacgctgagcaaagttcaggtacgtatgcctgaagaggttgaggagctggaacaacagcgtcgtatggaagccgagcgtttagcgcaaatgcagcagcttagccatcaggatgacgactctgcagccgcagctgcactggcggcgcaaaccggagagcgcaaagtaggacgtaacgatccttgcccgtgcggttctggtaaaaaatacaagcagtgccatggccgcctgcaataaaagctaactgttgaagtaaaaggcgcaggattctgcgccttttttataggtttaagacaatgaaaaagctgcaaattgcggtaggtattattcgcaacgagaacaatgaaatctttataacgcgtcgcgcagcagatgcgcacatggcgaataaactggagtttcccggcggtaaaattgaaatgggtgaaacgccggaacaggcggtggtgcgtgaacttcaggaagaagtcgggattaccccccaacattttagcctatttgaaaaactggaatatgaattcccggacaggcatataacactgtggttttggctggtcgaacgctgggaaggggagccgtggggtaaagaagggcaacccggtgagtggatgagcctggtcggtcttaatgccgatgattttccgccagccaatgaaccggtaattgcgaagcttaaacgtctgtaagtcagataaggcgttttcgccgcatccgacattcgcacacgatgcctgatgcgacgctggcgcgtcttatcaggcctaaagggatttctaactcattgataaatttgtttttgtaggtcggataaggcgttcacgccgcatccgacatttgcacaagatgcctgatgcgacgctgtccgcgtcttatcaggcctacgtgcggcatcagacaaatgtcactgctttggttcttcgctccagtcatcgctttcggaaagatcgccactgctggggattcgtttttcttcagcagcccattctccgaggtcgatcagctgacaacgtttggagcaaaatggccgaaacgggctgatttcaccccacaccaccgttttcccgcaggttgggcaattcaccgtaatagtttcactcatttttactccttagcaacaggccagttcgaaatccagacgttccggtacctgtccgttttcagtgtccagcggcataaaacgaatggcaaaacggctcttatgtccggaaatttgcggataaagctgactatcgaggctcagattcaggcgcagcaagtcggcatcgccaccgttatcctgataaaaaccattcaggctggtttgtttacggaagggggcgctctggcgaattaaatccagcaccatggtaagtgcctgggtgagcgggttcaggctggcaatccaggtttctacctggctgtcgcgctgcgcctggggtagatgcagccaaatgtgcaatgtaggtaaatcaaagctgcaacagccgcctgggatgctcagtcgctgacgcaccagagcaatcaaacgatcttcacgcagaaattgcccgatacgcggcgcggaaattaatacgctccccgccgcttttaactgctgaattaatgcttcaatacggctctggtccacgccaggcacgccaatccaggtctggagtttacgttgctgccggtcaagttctttcaacagctcagtgcggacttcgccgcgctcgaaaacatccagtaattcactgacattacggaagaaatgcagcgcgccagcgtggtcaacgatgggtaaattaacggtgagttgctgaatcaaaaactcaatgcgcagccatgtacgcattttttcatttagtggatgttcaaaaaggacctgggtctgcattacggtttttcctgactgacaaactggctcgcaagctgcaaatagtgtgcgtgcaggcgggcaacatcgcttgcgatagcatccggtgcgccgttattatcaatgacgtcatctgccacggcaaggcgggcttcgcgcgttgcctgagcagcaaggatttgttcgacatgctcgcgagttacatcatcgcgctgcatggtgcgcttaagttgcgtttctgggctgacatccaccacaagcactcgattcgcttttttatacagactgttttctaccagcaatggcacaacccacagtacatagggggaagtagcttgctggatctggtgttgcgtctcttgctgaatcagcggatgcagcagggcgttaagccagtttttctcttccgggttggcgaagatccgctcgcgcaaggcccggcgctgcaatgttccatcagcagcaatcatgttagcgccaaagtgatcagcaatggcatgtagcgcaggtgcacctggttcaaccacctgacgcgcaataatatcggcatcaatgacgttaattccgagatcagcaaacgcattggcaacggtactcttgccactgccaatgcctcccgttaaggcaactatatacctcataatttatattcccgggaattcatcatgattatcaaaacgttaaaaatgagtgcacgaaagcgaaattgatgaaacgttcgctcactatttaccaggtaaatttatgggattgtagcgtaaaaaaagacaatttcgcagtcttgcgccgcattgattagtgcgtatgatagcgtcactggagttgcgctcttacccttatagccattaaccccaggaatccgcacatgcgtattgaagaagatctgaagttaggttttaaagacgttctcatccgccctaaacgctccactcttaaaagccgttccgatgttgaactggaacgtcaattcaccttcaaacatagtggtcagagctggtccggcgtgccgattatcgccgcaaatatggacaccgtaggcacattttctatggcctctgcgctggcttcttttgatattttgactgctgtgcataaacactattctgtcgaagagtggcaagcgtttatcaacaattcttccgctgatgtgctgaaacatgtgatggtttctaccggtacgtctgatgcggatttcgaaaaaactaaacagattctcgacctgaacccggcattaaacttcgtttgtattgacgtggcgaatggttattccgaacacttcgtgcagttcgttgcgaaagcgcgtgaagcgtggccgaccaaaaccatttgtgctggtaacgtagtgactggtgaaatgtgtgaggagcttatcctcagtggtgccgatatcgttaaagttggcattggcccaggttctgtttgtacaactcgcgtcaaaacaggcgtcggttatccgcaactttctgcggtaatcgaatgtgccgatgctgcgcacggtctgggcggaatgatcgtcagcgatggtggctgcaccacgccgggcgatgtggcgaaagcctttggcggcggtgccgatttcgtcatgcttggcggcatgctggcgggccacgaagagagcggcggtcgcatcgttgaggagaacggcgagaaatttatgctgttctacggcatgagctccgagtctgcgatgaaacgtcacgttggcggcgttgcggaatatcgcgcagcagaaggtaaaaccgttaagctgccgctgcgaggcccggttgaaaataccgcgcgagatattttgggcggcctgcgtagtgcttgtacatacgttggggctagtcgcctgaaagagctgaccaagcgcaccacgtttattcgtgtgcaggaacaagaaaaccgcatcttcaacaacctgtaatctcccaacgctggcgtggagcaacacgccagcgttatcccatcccactcatcgcatcgcctaaatggaaaattggcagatacattgccaccaccagcgtaccaataattcctcccgttatgatcagcaacgccggttccagtaaggctgcgaggttatccgccagcgccattgtgttttcccgatgatgatgggcgaggttgtctaacatgagatccagagagccggatgcctctcctgttctcactaattgcaaacagagcgggctaaactcaccggtattttttagcgccagccagatgggttgaccgttactgatatcgtgctggatttgtgtcagaagttgcacccagtacgggcagcgcattgtttctctgacgctctctacgccctgtaaaaaagtaatgcctgcactttgtgtcagcgccagaatcgtaaagatctgcgtgagtttttgtccccgcatcagactacccataatcgggatgcgtaacagcaatttctgccgcactataagccaggtcggtcggcgcatcagcaacttattggctatcgccagcagaaagccgaacaacaccagcagccagctccattcgccactaaagtctgccagcgtcatgatcccctgcgttagtgccggtagtggggtgttgaaggtcttatagatagcggcaaactccggcagaacaaaatgcagcattgccacaaccaccatgattgccatcgctaaaatgatgatgggataacgtaacgcacttttcactttgtcggtcaactgacgctgggctttttgctgacgcgccagttcaaagcagcattcatccagcttaccggtcagttcacccgtgcggatcatcgcctgatagagcggcggaaatacctcactccagggtaataaggcattggaaaaagcaatgccctgttcgagatcgtgcgccaggctttgcagcaacgcttgccattgcttactgggatgctgttccgccagcagagccagcccttcagaaagcgttaaccctgctttgagtagcgtcgccagttgatgaatgacttccgcgcttttatctcctcgccactgcgcagaattgatggcgattcgcttcaggcttagtggggtaaccatctgttgctgtagtgccataagcagtaaagtacggctctctgcccatagcatcccatcttgcgcattgccgtcgccggttatgccatgccagcgccagagttgcttactcgccatgcggcatcctcagtacgcggattaactcttcaaaggtggttaagccttgctctacggccaggcagccgttttcaaaaagcgtacgcatacccgcctgtcgtgcgtgcgtttccaggctttcaacgtcggtattagcggaaataagctgacgaatgaccggcgttatgggcagaacttcaaataaggccgtacgaccataaaaaccgtggtagcaatgtacacaaccgggtgcctgccagtggggcagcgggcttggccatacattgtctggaatgtggatgggctccccttgctgccggcgacaatgtgggcaaagtttgcgtaccagacgctgggctattaccagcgtaagcgcgctacttagcatccagcgggcgacccccatttgctgtaaacgtaccagcgtttcgcaggtggaattagtgtgtagggtagacaacaccaggtgaccagtttgcgccgctttaatagcgatctctgctgtttcgccatcgcggatctctccgatcatgatgacgtcaggatcctggcgcaataacgcacgcaaaacgccctgaaaggtgagtccggcacgcggatggatttgcgtctggtttagtccggctatggggatctcaactggatcttcgacgctacaaatattaatgtcagcggtattcagcttttgcagggcactataaagcgtgaccgttttgccgctgccggtagggccagttaccagcaccagtccctgtggttgttgcaaggcatgagcaaagtccgccagttgtaacggctgcattccaagcgtgttgacatccagtgcctgacccacctgctgtaacaaccttaataccaccttttcaccaccccgacatggtaaggtcgcaatacgaaaactgacggcgtttcctgccagttcgacagtgaattgcccgtcctgcggcaggcgatgttccgcaatatccaggtttcccagcacttttaatctggcggttaatgcgactccggcatccggactaacatccggtaaaggatgcaatacgccgtcgatacgcaagcggatgcggtaggcattgtccgctggttcgatatgaatatcagacgcgcgttgttccagcgcagattgtaacgttcgagttagcaactctgctttgggctgatgcttctcctgaacagctacgggcagtgtctgttgtgtgcgactggcgtgaccttccatttgttggcgcgtccagcaggtgatctcaatacgtttggtggtagcgaaatgcaatgcgtccagtagctcatggctaggtgcatcgactaccgcaacatgaaccacctcttcgctggcatccagcaagactccatgataacgcagacacagggcagtgagctgtggaatattcattgccgctccttagttggcgtcatcaaagcggaagacatcttcgcaggcttgctgcaatgcgctgtcactttgaatattgcagttgcgcgtccagccggtgacgccgtttgcgttatcccaacccggtgtcatgacgacgcttagcccattgagactttcttgcccggtcaggctcaccacgccctttgccacactcatggcactaacatagcgggtggtggtagggctgggaatgccattgctgccaccgtcgcaggtatctaatccaccatgttccagcgcgcacaactctacggcggtacggtaaggcacaaaggtttgtagcatgtcggtgagtgcggctttgcgcaggtagttttgataagcgggaataccaatggcgcttaaaatggcaatgatgccaataaccaccatcagttcgataagtgtaaaaccgcgttgcttgtccatctgtttcgctccttgatttggttggcgctactttggcaaacgccatcagcacaggcgaggggcaaaaaacgaaacgggaaagcagattccgaggttttttatttcgttgcagcgaaagacaagaaatttgcgaggcgttacgaagaaagttggggaaggggagattatccgcccgcgatggagcggataaatctgtcaactattagcgaaaacgcatactaaggtcgagtgcttgtacgtgtttagttagcgcaccgacggagataaagtccacgcccgtttcggcaaattcacgcagtgttttgtcagtgacgttgccagacacttccagtagcgccttgccgttggtgcgtttgacggcttcgcgcatctgttctgtttcgaagttatccagcatgatgatatcggctcctgctttcagggcttcatcaagttcttccagattctctacttcgacttctactggcgcatccgggtgcagccaggacgctttttcgaccgcctggcgcacactgccggaggcaataatatggttttctttgatcaggaaggcatcagaaagccccagacggtgattcgctccgccgccgcaaagtaccgcgtatttcagagcactacgcaggccgggtaaggttttgcgcgtatccaacaactgcgtgttggtgccttccagcaattcgacatagtggcgtaccttactggcaactccactaagggtttgcacaaaattaagcgcagtgcgttcgcccgttaacagcacgcgggatgggccttcaagttcgaacaaggattgattggcattgatgacatcgccgtcatccacatgccagattatggtgacatcgtcgcctgccagttgaataaacacctcttcaacccagcgtttgccgcaaaagacgccattctcgcgggtgatcaccgtggcatgagagcgagaattttccggtaaaagttttgccgtaatatcattgttggcatcgactgttccgcctaaatcttcccgcagcgcctgggccaccgcgccggggatatcgagattaatgcgttccagcagctcgtcacgtcgggtgtcagggttatagcggcgaggcggcatgttaaaactccagatagctaacgaatcataaggtagaaacatgctactctgaaccgggtattagcaccacatataaggagatcctgcatgttgttagaacaggggtggctggttggcgcgcgccgcgttcccagtccacattacgattgccgcccggatgacgaaacacccaccctgctggtggtgcacaatattagcctgccgccaggcgagtttggcggtccgtggatcgacgcattattcactggaactattgatccgcaggcacatcctttctttgctgagatcgcccatttgcgcgtctccgctcactgtttgattcgccgtgatggtgaaatagtccagtatgttcctttcgataaacgtgcatggcatgcgggagcctctcagtatcaggggcgcgaacgctgcaatgatttttctattgggattgagcttgaaggcaccgatacgctggcgtataccgatgcgcagtatcaacagcttgcggcggttacgcgggcactgattgattgctatccggatatcgctaaaaacatgacgggccattgtgatattgcgccggatcggaaaaccgatcccggtcctgcatttgattgggcacggtttcgtgtgctggtcagcaaggagacaacatgacgctatttacaaccttactggtgttaattttcgagcgcctgtttaagttgggcgagcactggcagcttgatcatcgtcttgaagcgttctttcggcgggtgaaacatttttctctcgggcgcacgttaggcatgaccattattgcgatgggcgtgacttttttactgttacgcgcattgcagggagtattgttcaacgttcccacgctactggtgtggctgctgattggtttgctgtgtattggcgcaggtaaagttcgtcttcattatcatgcttatctgacagctgctagtcgtaatgatagccatgcccgtgccacgatggctggcgaactcaccatgattcacggcgtcccggcaggctgcgacgaacgtgagtatttgcgtgagctgcaaaatgcattgctgtggattaactttcgtttttatcttgcaccgctgttctggctgattgtggggggaacctggggacccgttacgctgatggggtatgcgtttttgcgtgcatggcaatactggctggcgcgatatcagacgccgcatcatcgtttacagtccggcattgatgccgtgcttcatgtactggattgggtgccggttcgtcttgcgggtgtggtatatgccttgatcggtcatggtgagaaagcgttaccggcctggtttgctagcctgggtgatttccatactagccagtatcaggtgttaacgcgtctggcgcagttctctctggcgcgtgaaccgcatgtcgataaggtggagacgccgaaggcagcggttagtatggcgaagaaaaccagcttcgtggtcgtggtggtgattgcactactgacgatttacggggcgttggtgtaaagattattgccctcaccctgtacgggtgagggcgtagagagattaatgcgcttttacggctttggcggttttctctttaaacagatagccgatacctaacacgatcagccataccgggatcaggtatacgctaatcgccattcctggggtcatcagcataatcaccagtaccgccgccataaacagcaggcagatccagttacccagcggataaagcagagcagggaagcgagttaccacgccttgttcctgcttggcgcgacggaatttcatatgcgccaggctaatcatcgcccagttgattaccagtgcagataccaccagcgccattaacagtccgaaagcggactctggggcaaggtagttaatcagtacgcacaacgccgttaccagtgcagacaccagaatggtatttactggtacaccacgtttatcgacagacgccagcgcttttggcgcattaccctgttgtgccagaccaaacagcatacggctgttgcaatatacgcagctgttgtacacggagagcgccgcagtcagtaccacgatgttcagcgcattcgccacaaaggtatcgcctaactcgtggaagatcagcacaaacggactggtatcggcggtaacgcgggtccacggcatcagactgagcagaacggctaagctaccaatatagaaaatcaggatgcggtagataacctggttagttgctttcggtatactttgctccgggttatcagcttctgctgcggtgatccccaccagttccagaccaccgaagctgaacatgataatcgccatcatcatcaccagcccggtgaagccgtgcggcaggaaaccaccctgatcccacaggttgctaacggtcgcctgcgggccgccgttgccactgaatagcagccagccgccgaagatgatcatcgctaccaccgcgataactttgataatggcaaaccagaactccatctcgccaaacactttaacgttggtcaggttgatggcgttaatcaccacaaagaatacggcggcagaaacccaggtggggatttccggataccagaactgaatgtatttacccacggcagtcagctcagccatggcaactaaaacgtacagtacccagtagttccagccagaggcgaaaccggcaaaactgccccagtatttataagcaaagtggctaaaggagcctgcgacaggttcttcgaccaccatttcacccagctgacgcatgatcagaaaggcgataaaaccagcaatggcgtaacccaggataatccctggccctgcggactgtattacggaggcgctacccaggaataacccggtccctatcgcgccacccagcgcgataagctgaatatggcggtttttaaggccgcgctttagctgctcgccgtgctgttgaccttccatcatgaaacctcgtgcggtggttgtttttttgatctacgcagtgatgcgtgtgtaagtttgcaattccgtttgttgtattaatttgtttacatcaaagaagtttgaattgttacaaaaagacttccgtcagatcaagaataatggtatgcggcagcgaatgcacccgctttatgcatggttgaagatgagttgcttaaaaagaaaccgtttgtaaagctcagcctcaacccctctcaatatgtagaatgaatttaaattcgttttaattgaattaaaaatcacaaaattggtaagtgaatcggttcaattcggatttttatagtttaataatcgttaaaaaactcctttcctacgtaaagtctacatttgtgcatagttacaactttgaaacgttatatatgtcaagttgttaaaatgtgcacagtttcatgatttcaatcaaaacctgtatggacataaggtgaatactttgttactttagcgtcacagacatgaaattggtaagaccaattgacttcggcaagtggcttaagacaggaactcatggcctacagcaaaatccgccaaccaaaactctccgatgtgattgagcagcaactggagtttttgatcctcgaaggcactctccgcccgggcgaaaaactcccaccggaacgcgaactggcaaaacagtttgacgtctcccgtccctccttgcgtgaggcgattcaacgtctcgaagcgaagggcttgttgcttcgtcgccagggtggcggcacttttgtccagagcagcctatggcaaagcttcagcgatccgctggtggagctgctctccgaccatcctgagagtcagtatgacttgctcgaaacacgacacgccctggaaggtatcgccgcttattacgccgcgctgcgtagtaccgatgaagacaaggaacgcatccgtgaactccaccacgccatagagctggcgcagcagtctggcgatctggacgcggaaagtaacgccgtactccagtatcagattgccgtcaccgaagcggcccacaatgtggttctgcttcatctgctaaggtgtatggagccgatgttggcccagaatgtccgccagaacttcgaattgctctatagccgtcgcgagatgctgccgctggtgagtagtcaccgcacccgcatatttgaagcgattatggccggtaagccggaagaagcgcgcgaagcaagccatcgccatctggcctttatcgaagaaattttgctcgacagaagtcgtgaagagagccgccgtgagcgttctctgcgtcgtctggagcaacgaaagaattaatgatttttctggtaaaaattatccagaagatgttgtaaatcaagcgcatataaaagcgcggcaactaaacgtagaacctgtcttattgagctttccggcgagagttcaatgggacaggttccagaaaactcaacgttattagatagataaggaataacccatgagtgaacgtttcccaaatgacgtggatccgatcgaaactcgcgactggctccaggcgatcgaaagcgtcatccgtgaagaaggtgttgagcgtgctcagtatctgatcgaccaactgcttgctgaagcccgcaaaggcggtgtaaacgtagccgcaggcacaggtatcagcaactacatcaacaccatccccgttgaagaacaaccggagtatccgggtaatctggaactggaacgccgtattcgtagtgctatccgctggaacgccatcatgacggtgctgcgtgcgagcaaaaaagacctcgaactgggcggccatatggcgtccttccagtcttccgcaaccatttatgatgtgtgctttaaccacttcttccgtgcacgcaacgagcaggatggcggcgacctggtttacttccagggccacatctccccgggcgtgtacgctcgtgctttcctggaaggtcgtctgactcaggagcagctggataacttccgtcaggaagttcacggcaatggcctctcttcctatccgcacccgaaactgatgccggaattctggcagttcccgaccgtatctatgggtctgggtccgattggtgctatttaccaggctaaattcctgaaatatctggaacaccgtggcctgaaagatacctctaaacaaaccgtttacgcgttcctcggtgacggtgaaatggacgaaccggaatccaaaggtgcgatcaccatcgctacccgtgaaaaactggataacctggtcttcgttatcaactgtaacctgcagcgtcttgacggcccggtcaccggtaacggcaagatcatcaacgaactggaaggcatcttcgaaggtgctggctggaacgtgatcaaagtgatgtggggtagccgttgggatgaactgctgcgtaaggataccagcggtaaactgatccagctgatgaacgaaaccgttgacggcgactaccagaccttcaaaagcaaagatggtgcgtacgttcgtgaacacttcttcggtaaatatcctgaaaccgcagcactggttgcagactggactgacgagcagatctgggcactgaaccgtggtggtcacgatccgaagaaaatctacgctgcattcaagaaagcgcaggaaaccaaaggcaaagcgacagtaatccttgctcataccattaaaggttacggcatgggcgacgcggctgaaggtaaaaacatcgcgcaccaggttaagaaaatgaacatggacggtgtgcgtcatatccgcgaccgtttcaatgtgccggtgtctgatgcagatatcgaaaaactgccgtacatcaccttcccggaaggttctgaagagcatacctatctgcacgctcagcgtcagaaactgcacggttatctgccaagccgtcagccgaacttcaccgagaagcttgagctgccgagcctgcaagacttcggcgcgctgttggaagagcagagcaaagagatctctaccactatcgctttcgttcgtgctctgaacgtgatgctgaagaacaagagcatcaaagatcgtctggtaccgatcatcgccgacgaagcgcgtactttcggtatggaaggtctgttccgtcagattggtatttacagcccgaacggtcagcagtacaccccgcaggaccgcgagcaggttgcttactataaagaagacgagaaaggtcagattctgcaggaagggatcaacgagctgggcgcaggttgttcctggctggcagcggcgacctcttacagcaccaacaatctgccgatgatcccgttctacatctattacagcatgttcggcttccagcgtattggcgatctgtgctgggcggctggcgaccagcaagcgcgtggcttcctgatcggcggtacttccggtcgtaccaccctgaacggcgaaggtctgcagcacgaagatggtcacagccacattcagagcctgactatcccgaactgtatctcttacgacccggcttacgcttacgaagttgctgtcatcatgcatgacggtctggagcgtatgtacggtgaaaaacaagagaacgtttactactacatcactacgctgaacgaaaactaccacatgccggcaatgccggaaggtgctgaggaaggtatccgtaaaggtatctacaaactcgaaactattgaaggtagcaaaggtaaagttcagctgctcggctccggttctatcctgcgtcacgtccgtgaagcagctgagatcctggcgaaagattacggcgtaggttctgacgtttatagcgtgacctccttcaccgagctggcgcgtgatggtcaggattgtgaacgctggaacatgctgcacccgctggaaactccgcgcgttccgtatatcgctcaggtgatgaacgacgctccggcagtggcatctaccgactatatgaaactgttcgctgagcaggtccgtacttacgtaccggctgacgactaccgcgtactgggtactgatggcttcggtcgttccgacagccgtgagaacctgcgtcaccacttcgaagttgatgcttcttatgtcgtggttgcggcgctgggcgaactggctaaacgtggcgaaatcgataagaaagtggttgctgacgcaatcgccaaattcaacatcgatgcagataaagttaacccgcgtctggcgtaagaggtaaaagaataatggctatcgaaatcaaagtaccggacatcggggctgatgaagttgaaatcaccgagatcctggtcaaagtgggcgacaaagttgaagccgaacagagcctgatcaccgtagaaggcgacaaagcctctatggaagttccgtctccgcaggcgggtatcgttaaagagatcaaagtctctgttggcgataaaacccagaccggcgcactgattatgattttcgattccgccgacggtgcagcagacgctgcacctgctcaggcagaagagaagaaagaagcagctccggcagcagcaccagcggctgcggcggcaaaagacgttaacgttccggatatcggcagcgacgaagttgaagtgaccgaaatcctggtgaaagttggcgataaagttgaagctgaacagagcctgatcaccgtagaaggcgacaaggcttctatggaagttccggctccgtttgctggcaccgtgaaagagatcaaagtgaacgtgggtgacaaagtgtctaccggcagcctgattatggtcttcgaagtcgcgggtgaagcaggcgcggcagctccggccgctaaacaggaagcagctccggcagcggcccctgcaccagcggctggcgtgaaagaagttaacgttccggatatcggcggtgacgaagttgaagtgactgaagtgatggtgaaagtgggcgacaaagttgccgctgaacagagtctgatcaccgtagaaggcgacaaagcttctatggaagttccggcgccgtttgcaggcgtcgtgaaggaactgaaagtcaacgttggcgataaagtgaaaactggcagcctgattatgatcttcgaagttgaaggcgcagcgcctgcggcagctcctgcgaaacaggaagcggcagcgccggcaccggcagcaaaagctgaagccccggcagcagcaccagctgcgaaagcggaaggcaaatctgaatttgctgaaaacgacgcttatgttcacgcgactccgctgatccgccgtctggcacgcgagtttggtgttaaccttgcgaaagtgaagggcactggccgtaaaggtcgtatcctgcgcgaagacgttcaggcttacgtgaaagaagctatcaaacgtgcagaagcagctccggcagcgactggcggtggtatccctggcatgctgccgtggccgaaggtggacttcagcaagtttggtgaaatcgaagaagtggaactgggccgcatccagaaaatctctggtgcgaacctgagccgtaactgggtaatgatcccgcatgttactcacttcgacaaaaccgatatcaccgagttggaagcgttccgtaaacagcagaacgaagaagcggcgaaacgtaagctggatgtgaagatcaccccggttgtcttcatcatgaaagccgttgctgcagctcttgagcagatgcctcgcttcaatagtagcctgagcgaagacggtcagcgtctgaccctgaagaaatacatcaacatcggtgtggcggtggataccccgaacggtctggttgttccggtattcaaagacgtcaacaagaaaggcatcatcgagctgtctcgcgagctgatgactatttctaagaaagcgcgtgacggtaagctgactgcgggcgaaatgcagggcggttgcttcaccatctccagcatcggcggcctgggtactacccacttcgcgccgattgtgaacgcgccggaagtggctatcctcggcgtttccaagtccgcgatggagccggtgtggaatggtaaagagttcgtgccgcgtctgatgctgccgatttctctctccttcgaccaccgcgtgatcgacggtgctgatggtgcccgtttcattaccatcattaacaacacgctgtctgacattcgccgtctggtgatgtaagtaaaagagccggcccaacggccggcttttttctggtaatctcatgaatgtattgaggttattagcgaatagacaaatcggttgccgtttgttgtttaaaaattgttaacaattttgtaaaataccgacggatagaacgacccggtggtggttagggtattacttcacataccctatggatttctgggtgcagcaaggtagcaagcgccagaatccccaggagcttacataagtaagtgactggggtgagggcgtgaagctaacgccgctgcggcctgaaagacgacgggtatgaccgccggagataaatatatagaggtcatgatgagtactgaaatcaaaactcaggtcgtggtacttggggcaggccccgcaggttactccgctgccttccgttgcgctgatttaggtctggaaaccgtaatcgtagaacgttacaacacccttggcggtgtttgcctgaacgtcggctgtatcccttctaaagcactgctgcacgtagcaaaagttatcgaagaagccaaagcgctggctgaacacggtatcgtcttcggcgaaccgaaaaccgatatcgacaagattcgtacctggaaagagaaagtgatcaatcagctgaccggtggtctggctggtatggcgaaaggccgcaaagtcaaagtggtcaacggtctgggtaaattcaccggggctaacaccctggaagttgaaggtgagaacggcaaaaccgtgatcaacttcgacaacgcgatcattgcagcgggttctcgcccgatccaactgccgtttattccgcatgaagatccgcgtatctgggactccactgacgcgctggaactgaaagaagtaccagaacgcctgctggtaatgggtggcggtatcatcggtctggaaatgggcaccgtttaccacgcgctgggtagtcagattgacgtggttgaaatgttcgaccaggttatcccggcagctgacaaagacatcgttaaagtcttcaccaagcgtatcagcaagaaattcaacctgatgctggaaaccaaagttaccgccgttgaagcgaaagaagacggcatttatgtgacgatggaaggcaaaaaagcacccgctgaaccgcagcgttacgacgccgtgctggtagcgattggtcgtgtgccgaacggtaaaaacctcgacgcaggcaaagcaggcgtggaagttgacgaccgtggtttcatccgcgttgacaaacagctgcgtaccaacgtaccgcacatctttgctatcggcgatatcgtcggtcaaccgatgctggcacacaaaggtgttcacgaaggtcacgttgccgctgaagttatcgccggtaagaaacactacttcgatccgaaagttatcccgtccatcgcctataccgaaccagaagttgcatgggtgggtctgactgagaaagaagcgaaagagaaaggcatcagctatgaaaccgccaccttcccgtgggctgcttctggtcgtgctatcgcttccgactgcgcagacggtatgaccaagctgattttcgacaaagaatctcaccgtgtgatcggtggtgcgattgtcggtactaacggcggcgagctgctgggtgaaatcggcctggcaatcgaaatgggttgtgatgctgaagacatcgcactgaccatccacgcgcacccgactctgcacgagtctgtgggcctggcggcagaagtgttcgaaggtagcattaccgacctgccgaacccgaaagcgaagaagaagtaatttttcgtttgccggaacatccggcaattaaaaaagcggctaaccacgccgctttttttacgtctgcaatttacctttccagtcttcttgctccacgttcagagagacgttcgcatactgcactccgttgctcgttattcagcctgacagtatggttactgtcgtttagacgttgtgggcggctctcctgaactttctcccgaaaaacctgacgttgttcaggacttgcgctttgaacacgctggcgggcgttatcacgttgctgttgattcagtgggcgctgctgtactttttccttaaacacctggcgctgctctggacttgcggactgaatacgctcacgcgctgcgtctcttcgctgctggttctgcgggttagtctgcattttctcgcgaaccgcctggcgctgctcagggctggcggactgaatgcgctcacgcgctgcctctcttcgctgctggatcttcgggttagtctgcattctctcgcgaactgcctggcgctgctcagggctggcggactgataacgctgacgagcggcgtccttttgttgctgggtcagtggttggcgacggctgaagtcgtggaagtcgtcatagctcccatagtgttcagcttcattaaaccgctgtgccgctgcctgacgttgggtatctcgtgtaatgactggtgcggcgtgtgttcgttgctgaaactgatttgctgccgcctgacgctggctgtcgcgcgttggggcaggtaattgcgtggcgctcattccgccgttgacatcggtttgatgaaaccgctttgccatatcctgatcatgatagggcacaccattacggtagtttggattgtgccgccatgccatattcttatcagtaagatgctcaccggtgatacggttgaaattgttgacgtcgatattgatgttgtcgccgttgtgttgccagccattaccgtcacgatgaccgccatcgtggtgatgataatcatcattgtcatgatgatgatggtcatgatcgtcgtcgtcccagtcgatgctgctgaatagtgcgtacgtggtagcaacgcccatgctatagccgaatccgcgtacaaagctgtcaacaaacggttctccggctggtggtggcagataaaccggcggatacgcagtattggcccagttcccgtaaaccacggttgggttgtagttgggaatatagaccacatcaggattggcgggctcaatggaaatgacggttgttgccggctctgtaatgacggggttggcagttaaaactgtattggatggtatgacgggtgccgtgactgtctgttttaccggtacagctttcttcgttgtggtaataactttctgttcggtactactcttcaggctgccggtttgttgcgccagttgccgcaatcgctgtacgctgtccatcacgtcctgcggctgggccagaaaagcatcgcccaggttttgcacccattgcgggttttcgcccatcaatgccatcaattgtggaaaggccaccagacttttaacgctggcgtcccacggctggtcagataccgcctgaatagcagcatcgccttgtttaagtggattatcgtggctccattgcactgcttgagcaacgtttgtcggataggtacttgccatcagcacctggctaagtagggcgtcgggatacagcgcgacgggcgcgacccattgatctatttgtgcagtgctgaatgcggatttgacgacggcgggtgttacgggaggtgcggaaaccgttgcaggaaacgtaaccgcggcagcgtcagacacagccagttgtgtgctttgcggttccacaggcgcttccactgtgcggctttttatatatagcccggtagaggcggcacaaagcccggcactgcaaattagcgccagcacatggggtttaaacggcaaagtcattttcataattcggatctcaaggaaatcgcaatggtcggcgaactgccacccgcaggtgctgtgaatccgagtataaagaggcggtagtttaaattttgactaatcttgggattcgttgagaaaggtgattatcaccatgcgaattaacgaagtttttacggagggaaacaatctctagaccatccttaacgattcagccacttttttatgttgcttttttgtaaacagattaacacctcgtcaaaatcctgctattctgcccgttgcggtactgggcatttaccctacaaactgctgtctcacaggagcgtgaagagaatcgcctgccgcactatgacaatgagagcgaggagaaccgtcgtgctagaagaataccgtaagcacgtagctgagcgtgccgctgaggggattgcgcccaaacccctggatgcaaaccaaatggccgcacttgtagagctgctgaaaaacccgcccgcgggcgaagaagaattcctgttagatctgttaaccaaccgtgttcccccaggcgtcgatgaagccgcctatgtcaaagcaggcttcctggctgctatcgcgaaaggcgaagccaaatcccctctgctgactccggaaaaagccatcgaactgctgggcaccatgcagggtggttacaacattcatccgctgatcgacgcgctggatgatgccaaactggcacctattgctgccaaagcactttctcacacgctgctgatgttcgataacttctatgacgtagaagagaaagcgaaagcaggcaacgaatatgcgaagcaggttatgcagtcctgggcggatgccgaatggttcctgaatcgcccggcgctggctgaaaaactgaccgttactgtcttcaaagtcactggcgaaactaacaccgatgacctttctccggcaccggatgcgtggagtcgcccggatatcccactgcacgcgctggcgatgctgaaaaacgcccgtgaaggtattgagccagaccagcctggtgttgttggtccgatcaagcaaatcgaagctctgcaacagaaaggtttcccgctggcgtacgtcggtgacgttgtgggtacgggttctagccgtaaatccgccactaactccgttctgtggtttatgggcgatgatattccacatgtgccgaacaaacgcggcggtggtttgtgcctcggcggtaaaattgcacccatcttctttaacacgatggaagacgcgggtgcactgccaatcgaagtcgacgtctctaacctgaacatgggcgacgtgattgacgtttacccgtacaaaggtgaagtgcgtaaccacgaaaccggcgaactgctggcgaccttcgaactgaaaaccgacgtgctgattgatgaagtgcgtgctggtggccgtattccgctgattatcgggcgtggcctgaccaccaaagcgcgtgaagcacttggtctgccgcacagtgatgtgttccgtcaggcgaaagatgtcgctgagagcgatcgcggcttcagcctggcgcaaaaaatggtaggccgtgcctgtggcgtgaaaggcattcgtccgggcgcgtactgtgaaccgaaaatgacttctgtaggttcccaggacaccaccggcccgatgacccgtgatgaactgaaagacctggcgtgcctgggcttcagcgctgacctggtgatgcagtctttctgccacaccgcggcgtatccgaagccagttgacgtgaacacgcaccacacgctgccggacttcattatgaaccgtggcggtgtgagcctgcgtccgggtgacggcgtcattcactcctggctgaaccgtatgctgctgccggataccgtcggtaccggtggtgactcccatacccgtttcccgatcggtatctctttcccggcgggttctggtctggtggcgtttgctgccgcaactggcgtaatgccgcttgatatgccggaatccgttctggtgcgcttcaaaggcaaaatgcagccgggcatcaccctgcgcgatctggtacacgctattccgctgtatgcgatcaaacaaggtctgctgaccgttgagaagaaaggcaagaaaaacatcttctctggccgcatcctggaaattgaaggtctgccggatctgaaagttgagcaggcctttgagctaaccgatgcgtccgccgagcgttctgccgctggttgtaccatcaagctgaacaaagaaccgatcatcgaatacctgaactctaacatcgtcctgctgaagtggatgatcgcggaaggttacggcgatcgtcgtaccctggaacgtcgtattcagggcatggaaaaatggctggcgaatcctgagctgctggaagccgatgcagatgcggaatacgcggcagtgatcgacatcgatctggcggatattaaagagccaatcctgtgtgctccgaacgacccggatgacgcgcgtccgctgtctgcggtacagggtgagaagatcgacgaagtgtttatcggttcctgcatgaccaacatcggtcacttccgtgctgcgggtaaactgctggatgcgcataaaggtcagttgccgacccgcctgtgggtggcaccgccaacccgtatggacgccgcacagttgaccgaagaaggctactacagcgtcttcggtaagagtggtgcgcgtatcgagatccctggctgttccctgtgtatgggtaaccaggcgcgtgtggcggacggtgcaacggtggtttccacctctacccgtaacttcccgaaccgtctgggtactggcgcgaatgtcttcctggcttctgcggaactggcggctgttgcggcgctgattggcaaactgccgacgccggaagagtaccagacctacgtggcgcaggtagataaaacagccgttgatacttaccgttatctgaacttcaaccagctttctcagtacaccgagaaagccgatggggtgattttccagactgcggtttaaaaagtcagcgcacgcgctgcgcataaacgacacaatgcccggtgaatgagattcccgggcatttttttatttctaaaccatcgccgttccgctgtttttctccggtaaggctgcgataattacatcaatggcgcaatgcgatttcggtgcattgccgggagcagaggaacacactatggattacgaatttctgcgcgatattaccggagtggtaaaggtgcgtatgtccatggggcatgaagtggtcgggcactggtttaatgaagaggtgaaagaaaacctggccttgcttgatgaagtggaacaagcagcgcacgcactgaaaggtagcgaacggtcctggcaacgggcagggcatgaatacaccctgtggatggacggtgaagaggtgatggttcgcgccaatcaactggaattcgctggcgatgaaatggaagaggggatgaactactacgacgaagaaagcctgagcctatgcggcgttgaggattttctgcaggtcgtggcggcttaccgcaatttcgtgcagcagaagtaaataaatctggcggagcctgggagctccgccagagccgttaaacagctggcatattgcgcccgtaataaatctcgcgcatttctttccacagcgcagcggtaatttcctggcgctcgctgtcggttaagtcttccggtttggtgtggaacatgtagtgcttaaggtcgaactctttaagcaacatcttggtatggaagatattttcctgatagacgttcacatccaccatgtcatacagcgccttcatatcgtcagacataaagttctgaatgctattaatctcatggtcgataaagtgcttcataccgttaatgtcgcgggtaaaaccgcgcacgcgataatcaatggttacgatatcggactcaagctggtggatcaggtaattcagcgccttcagcggagaaatcacgccgcaggtagagacttcaatatcggcgcggaaggtacataaaccgccttcaggatgactttccgggtaggtatgtacgcaaatatgacttttatcaagatgggcaacgaccgtttctggcagtgggccggggtgttctgttttgtcgatgagtttcgggtcaaccggttcttcactcaccagaatagtgacgctggcaccctgtggttcgtaatcctggcgggcgatgttaagaatattagccccgataatggaacaggtttcactcaggatttcggtcagacggttggcattatagagttcatcgatataagcaatataaccgtcgcgctcttcggcagttttggcgtagcagatatcgtaaatacaaaaactcagacttttggtcagattattaaagccatgcagtttcagttttttcaatttcttatcttctccttaggacggctgactagccagtgcgtcttgcagatactgaggtaaggcaaaagctgccgtatggattgccggattgtaataacggcatttcaggccagaggcgagaaaacgcgcctgaataatttcggtactgagatggcgtaaggcgtcgttatctgtcgcccatgcaaaagtcatgataccgccgtaataggtcgggatcgccgcctgataaaagccaacgtcgctgaagtaatggctgagtttgcgatggctgtcgatggcttcttcctgctgtaaaaagcagacgccgttttgtgcgacgaagataccgccaggattcaggcaacgtttgcagccttcataaaatgcgctagtgaaaaggctttcgccgggaccgataggatcggtgcagtcggagataatgacatcaaaggtctggctggtttgattaacgaaattgacgccatcgtcgatcaccagcttaaagcgcggatcgtcgtagctaccggcgttatggttgggtagatactgacggcagaagcttacgacacccgcatcgatttccaccatcgtgatactctcaacgtttttatgtcgggttacttcacgcagcatggcaccgtcgccgccgccgataatcagcacatgtttcgcgtgaccatgggccagtagcggaacatgggtcatcatctcatgatagataaactcgtcgcgctcggtggtttgtactacgccatccagcgccattacgcgaccaaatgcagcgttctcaaaaatgatcagatcctggtgatcggtcttttcatgatacagaacgttatctaccgcaaagtactgcccaaactggtcgtgtagcgtttcatgccactgttttttttcggccatgggttgatacctcctttgttaacacccgtaaaaaaagggcgcaacataatagctaacattgaccgcggatgcacggtcaatatttctacaaaaaggtatcagggattatttgacgtaggcaagcaggcttaaggaatcgcgggccagggctttgcattttttagcgacgggaatgccaatgccgctgagatcgcggtagctgtcttcaccgagggctttcatgtcgaaggtgtcgtaattactgaggtcccactggttttgctgagcgaaaaagaccagtgcgcgacgaatttgcccgttaggtaagttctggtaaccacaatcgttcttcagaaagacaaaaactgccgttaaatcggccatatcttcggcttcagactcgctgagcgcgtaactgtttgcgcagacggccatcaggctgccgaataacactgttctgaaaaacgtcttcattgcttctaccaggggcttaaagaagataaacgttagcacactgcgagcgaggcgacgaccattattgtcgattaaattgtgtctgcggcttgaccttcccgtaaggggaaggactatgctcaacgtttgattttgtttcgcctgcttaagaataaggaaataactatgcaacgtcgtgatttcttaaaatattccgtcgcgctgggtgtggctagcgctttgccgctgtggagccgcgcagtatttgcggcagaacgcccaacgttaccgatccctgatttgctcacgaccgatgcccgtaatcgcattcagttaactattggcgcaggccagtccacctttggcgggaaaactgcaactacctggggctataacggcaatctgctggggccggcggtgaaattacagcgcggcaaagcggtaacggttgatatctacaaccaactgacggaagagacaacgttgcactggcacgggctggaagtaccgggtgaagtcgacggcggcccgcagggaattattccgccaggtggcaagcgcagcgtgacgttgaccgttgatcaacctgccgctacctgctggttccatccgcatcagcacggcaaaaccgggcgacaggtggcgatggggctggctgggctggtggtgattgaagatgacgagatcctgaaattaatgctgccaaaacagtggggtatcgatgatgttccggtgatcgttcaggataagaaatttagcgccgacgggcagattgattatcaactggatgtgatgaccgccgccgtgggctggtttggcgatacgttgctgaccaacggtgcaatctacccgcaacacgctgccccgcgtggttggctgcgcctgcgtttgctcaatggctgtaatgcccgtagcctcaatttcgccaccagcgacaatcgcccgctgtatgtgattgccagcgacggtggtctgctacctgaaccagtgaaggtgagcgaactgccggtgctgatgggcgagcgttttgaagtgctggtggaggttaacgataacaaatcctttgacctggtgacgctgccggtcagccagatggggatggcgattgcgccgtttgataagcctcatccggtaatgcggattcagccgattgctattagtgcctccggtgctttgccagacacattaagtagcctgcctgcgttacctagcctggaagggctgacggtacgcaagctgcaactctctatggacccgatgctcgatatgatggggatgcagatgctaatggagaaatatggcgatcaggcgatggccgggatggatcacagccagatgatgggccatatggggcacggcaatatgaatcatatgaaccacggcgggaagttcgatttccaccatgccaacaaaatcaacggtcaggcgtttgatatgaacaagccgatgtttgcggcggcgaaagggcaatacgaacgttgggttatctctggcgtgggcgacatgatgctgcatccgttccatatccacggcacgcagttccgtatcttgagtgaaaatggcaaaccgccagcggctcatcgcgcgggctggaaagataccgttaaggtagaaggtaatgtcagcgaagtgctggtgaagtttaatcacgatgcaccgaaagaacatgcttatatggcgcactgccatctgctggagcatgaagatacggggatgatgttagggtttacggtataaaaagaccgtattcggaaatatgcccggatctctccgggcattaaactgatgacaaacgcaaatctgcctgatgcgctacgcttatcaggcctacgctagctgtgcaatccattgattttgcacaattttgtaggctggataaggcgttcacgccgcatccggcatgaacaacgcgcacgttgtcagcaatctgagcaagtcttacttcacatcatccggcagcgcataagccacaatatagtcgcccatcttcgtaccaaaactaccgtgaccgcctgcggagatcaccacatactgcttaccattcacttcataggtcattggcgtagcctgaccacccgctggtaaacgaccctgccacagtttttcaccgttgctcatgttgtaagcgcgcaggtagttatctgccgtagcggcgataaacagcacgttacccgccgtggagattggcccgcccagcatcggcatacccatattgaacggcaccggaaccggcatcgggaacggcatactgtcctgcggcgtaccaatacgtttcttccacaccacttcattagttttcagatccagcgcgctgatataaccccatgctggctgtttacatggcagaccaaatggactgaggaacgggttgagcgtgacaccatacggtacaccgtactgtggctgaatgccggattccgtacccgtgcctttggcatctttcggctgctccatcgggttgccaggaccacgcgggatcagtttgctaacaaacggcagtgccattgggttggcaatcgccacttcacgatttggatcaacggaaatcccgccccattcgaacatccccaggttacccgggaagaccagcgtaccctgttcagatggcggggtgaaaatgccttcatagcgcatctggtggaacatcacgcggcacaccagttggtcaaacatggtggctccccacatatccgcaccgctcaaatctttcgtcggacggaagctcagttcagaaaacggttgagttggggttacgtaatcgcctttcgctgcaccttggggaaccggtttttccggtgccggaaccaccagttcgccattacgacgatcgagcacaaaaatgttgccggttttcgccggagcgtaaataactggcactttctgaccattaacggtgatgtccgccagcgtcggctgtgccggaagatccatgtcccacaggtcgtggtgaacggtctggtagctccacgccagtttcccggtagtggcattcagcgccagaatgctgctggcataacgttcctgttccggtgtgcggttaccgccccagatatccggcgtggtcacgcccatcggcagatagaccagatccagcttcgcgtcataggccgctggtgcccaggagtttgggctgttaaaggtaaaggtgtgttcgtcagacgggattgcgttcggatctttcgcgccgggatcaaaagcccacagcagctccccggtgttgacatcaaaaccacggatcacgccagacgtttcgcgggtactgaagttatcggtaacactaccggccatcacgatggttttatcggtgataatcggtgggctagtcggttcatacagacccggtttggtgtctggcatattgctttgcagattgagcacgcctttattggcgaaggtttcgcacagtttgccgttttcagcgttaatcgcaatcagtcgaccatcattgaccggaagaatgatacgacgcgggcaatccgccatcacttccgggctagcggtttctgctttggcttcatgataagagacaccacggcaggttacgtgctggaaagactcgttggttttcagctcaggatcgtaatgccatttctctttgccgctggcggcatcaagcgcaaacaggcgctggtgagcggtacacaggtaaagggtgtcgcccactttaatcggcgtcacttcattggtgatttcacccggatcgttcggctgcttcacatcgccagtacggaacacccaggcttctttcagattatggacgttatcggcgttaatttgtttcagcgggctaaagcgttgaccttcctgattacgaccataggcaggccagtcctgatcggctacgggggagatagcttcagcaggtgtggcatcggcgcttaaggtgccgttgatctcctgcggatcgttaaatccggcccaggtcaggataccaccgctaatcagcagtgcgaccaccagtgcggcaactgcgccgctggcaggaatgaccaggcgacgccagacaaacggcaggatcagccagatgccgaagaagaccagaatgtcgctgcgcggagtcagcgcccagaagtcgaaaccaacttcccagacgccccaaatcatggtgccgagcagcagggctgcgtatagccaaagcgcggcgcgtttactgcgccacagcatccaggcgacgccgagcatcacaaggccagcgatagggtagtaccaggagccgccaatcgcgaccagccagcctccgccaatgagtagatacagcccgcaaagcgctgcaaaaagggctgttagcgtgacgagtaatcgtcggctgcctgtattgttaattgccataaagagacaccatttcaattcattaatattttagtagcaattaattataggttttaacatgtgtgatcgtcatcacaattcgagctttattaacagattccgcgaatgaatagttttactggtatactgcgtgtcttgcgctttgttgcggtgccaaaacctgcccgtgcgaagtgatttgtttttaaatcatatggttagagatatgaaacatactgtagaagtaatgatccccgaagcggagattaaagcgcgtatcgccgaactgggtcgtcagattactgagcgttacaaagacagcggcagcgatatggtgctggtgggtctgctgcgtggcagttttatgtttatggcggacctgtgccgtgaagttcaggtatctcatgaagtcgactttatgaccgcctccagctacggtagcggcatgtccaccacccgtgatgtgaaaatcctcaaagatctggatgaagatatccgtggcaaggacgtgctgattgttgaagatatcatcgacagcgggaatacactgagcaaagtgcgtgagatcttaagcctgcgcgaaccgaagagcctggcgatttgtacgctgctggataaaccgtcccgtcgtgaagtgaacgtcccggtagaatttatcggtttcagcatcccggatgagtttgtggtgggttacggcattgattacgcacagcgttaccgtcatctgccgtatatcggcaaagtgattctgctggacgagtaagtgtgaagttgccggatgtgttgcatccggcatggcatttttatttgtggttggcgtgtttcagcttgaggttggaaatcccgtgacggtaacgttgctcaagggtttcgcggttggtggcggtaacatccagatcacgcagcaagccgtcgtgaatgccgtaggcccagccgtgaatggtaactttctgcccgcgtttccacgcactttgcataatggtggagtggcccaggttatacacctgttccatgacgttcagttcacacaaggtatccagacggcgctcttgcggcatttcgccgagcaaactgctatgtttgaaccagatatcgcggatatgcagcagccagttgttgataagccccagttccgggttttcaactgcggcttgtacgccgccgcaaccgtagtggccacagataataatgtgttcaacttcgagtacatccactgcatactgaaccacggaaaggcagttcaggtcagtgtgaatgaccaggttagcaacattacggtgaacaaagagttcgcccggttcaagaccggttaaacgttctgcaggaacgcgactgtcggaacatccaatccatagaaagcgcggtttttgcgcttgtgccagtttctcaaaaaacccgggatcctcttccaccagcattttactccatagtgcattgttgctgatgagtgtatctatgtctttcatggaggttaacgacctgtaaccaaataattacgtttggctaatatagggcaactccgggacgatttaaaccacagataaagtgtaagaacgtaaggtaagtaaaaatttatgaccattgcactggaacttcaacagcttaaaaaaacctatccaggcggcgttcaggcgcttcgtgggatagatttgcaggtcgaagcgggtgatttttatgcgcttctcgggccgaacggggccgggaaaagcaccactatcggtattatcagctctctggtaaataaaacctccgggcgggtcagcgtatttggttacgatctcgagaaggatgtcgtgaacgctaaacgtcagttgggactggtgccgcaggaatttaacttcaacccgtttgaaaccgtgcagcaaattgtggtgaatcaggcagggtactacggcgtggagcgcaaagaagcgtacatccgcagcgaaaagtatcttaaacaactcgatctatggggaaaacgcaacgaacgtgcgcgtatgttatctggcgggatgaagcgccgtttaatgattgcccgtgcgttaatgcatgaacctaaactactgattctcgacgaaccgaccgcaggcgtggatattgaacttcgccgcagtatgtggggctttttgaaggatttaaacgacaaaggcaccaccatcattctcaccacacactacctggaagaagcagaaatgctgtgccgcaatatcggcattattcaacacggtgagctggtggaaaataccagcatgaaggcgctgctggcgaagctgaaaagcgaaacctttattctcgatctcgcaccgaaaagcccgttaccgaagctcgatggctatcagtatcgactggtcgataccgcgacgctggaagttgaagtgctgcgtgagcaggggatcaacagcgtatttacgcagttaagtgagcagggcattcaggtattaagtatgcgtaacaaagctaaccgtctggaagagctgtttgttagtctggttaatgaaaaacaaggagatcgcgcatgatgcatctttactgggtggcgctaaaaagcatctgggcgaaagagatccatcgctttatgcgtatctgggtgcagacgctggtgccgccagtcatcaccatgaccctttactttattatcttcggtaacctgattggtagccgtattggcgatatgcatggcttcagctatatgcagttcatcgtaccggggctgatcatgatgagcgtgatcaccaatgcctacgccaacgttgcgagtagtttttttggtgccaagttccagcgtaatattgaagagctgctggtagcgccggttccgactcacgtcattattgccggatatgtcggcggtggcgtggcgcgtggtctgtttgttggcattctggtgacggcaattagtctgttttttgtgccatttcaggtgcatagctgggtattcgttgccttaacgctggtgctcacggcggtgttgttctcccttgcgggtttgctgaacggtgtgtttgccaaaacgttcgatgacatcagcctggtgccaacctttgtgttaacgccactcacgtatttgggcggggtcttttacagtctgactttgttgccgccgttctggcaagggctgagccacctgaacccaatcgtttatatgatcagtggtttccgctacggcttcctcggtatcaatgatgttccgctggtcactacctttggcgtactggtggtctttattgtggcgttttatttgatctgttggagcctgatccaacgtggacgtggtttgcgtagctaaggctatttcctctcctctggatttgggggagaggagttttgacggctatcaccctttatcaacaatggtcagggtagactgattttcggctaaggaggaaggcgatgttaggttgggtaattacctgtcacgatgaccgggcgcaagagatactggatgcgctggagaaaaaacatggggcacttcttcagtgccgggccgtgaatttctggcgcggattaagctctaatatgctcagccgcatgatgtgcgatgctctgcatgaagcggactctggtgagggtgtcatcttcttaaccgatatagccggagcgccaccgtatcgcgtggctagtttattaagccacaaacactcccgttgcgaagtgatttctggtgtcacgttaccgttaattgaacagatgatggcttgccgtgaaaccatgaccagtagtgagtttcgcgagcgtattgtcgaactgggtgcgccggaggtgagtagtctttggcaccaacaacaaaaaaatccgcctttcgtcctcaaacataatttgtatgagtattaacccgcgattctgatggcgcttttgctacaataaaagcgttgtttcaccctcggttattttttcatgtacaaacaagctgttattctcctgctgatgctgtttaccgcaagtgtcagtgccgcgttacctgcccgttatatgcaaaccatcgaaaatgctgcggtctgggcgcaaattggtgacaagatggtgaccgtggggaatattcgggccggacaaatcattgccgtggagcccactgccgcaagttattacgcatttaattttggctttggcaaaggttttatcgataaaggtcatctcgagccggttcaggggcgacaaaaagttgaagacggtttgggcgacctcaacaagccgctgagtaatcagaacttagttacctggaaagatacgccggtctataacgcgccgagtgcgggaagtgcgccatttggggtactggcggacaatttgcgctacccgattttgcataaactgaaagacaggttaaatcaaacctggtatcagatccgtattggcgatcgactggcctatatcagcgcactggatgcccaacccgataatggcctgagcgtgctaacctatcaccatattctgcgcgacgaagaaaacacccgttttcgccatactagcacgaccacaagcgtacgcgctttcaataaccagatggcctggctgcgtgacaggggatacgcgacactgagcatggtgcagctggaaggctacgtgaagaataagatcaatctccctgcgcgagcggtggtgattacctttgatgatggcctcaagagcgtgagccgctatgcgtatcctgtgttgaaacaatatggcatgaaggcgacggcgtttattgttaccagtcgcatcaaacgtcacccgcagaagtggaacccaaaaagcctgcaatttatgagcgtttctgagcttaacgaaattcgcgatgtatttgatttccagagtcatacccattttttgcatcgggtagatggttatcgccgacccatattactgagccgtagtgagcacaatattctgtttgattttgcacgtagtcgccgcgctctggcgcaatttaatccgcatgtctggtatcttagctatccgtttggcggatttaatgacaacgccgtgaaggcagcaaacgatgccggatttcacctggcggtgacaaccatgaaaggcaaagtaaaaccgggggataatccgttgttactaaaacgactttatatcttaagaacggatagcctggagacgatgagccggctggtgagtaaccagccgcagggataacaatcaagcaacctgtaccggaatcgctttcgcggtacgtttcatttcattgtcgccttcaaaataggcgacgttgggtcgccaggtgcgagcttcttcatctggcatggtaacgaagctggcgatgatgacaatatcgccgacactggcgcagtgggccgccgcaccgttaacagaaataattctgctaccgcgttctgccgcgatggcataagtggagaaacgcttgccgttggtgacattccagatatcaatggcttcgttttcgagaataccggctgcgtcaagaaaatcctggtcaatggcgcaagaaccttcatagtgcaggtccgcatgagtcactttcacgcggtggagtttgccctgcagcatcgtgcgaatcataacttctacctttctaccctgtcgttaacgaagcaggcgatgcctgctttgaggaaattctcacgcagtattgcccgatttttgtttagtgtctactcatctgacggcatttgcgtcagcagtttgcgtaccgcgccgaagcgtgccatgtatcgcctgtaacgaattgatatttctctgaacgctgctcggtaaacaataaagaggtggctgacgatagcgcgccttgactggatactgccttcacgcaaagccacacggaagacagggaagatggatgcaccgagtaccacaccgcatgacgcggtatttaaacaatttttaatgcatgcggagacggctcgcgactttctggagatacatttgccagtggaattacgcgaactttgtgacctcaacacgcttcatttagagagcgggagtttcattgaagagagcctgaaaggacacagcacggacgtgctctattccgtgcaaatgcagggcaatcccggttatctgcatgttgtgattgaacaccaaagcaagccggataagaaaatggcctttcgcatgatgcgttattctatagccgccatgcaccggcatctggaggctgaccacgataagctgccgctggtggtgccgatactgttttatcagggcgaggccacaccttatccgctaagtatgtgctggtttgatatgttttacagcccggagctggcgcgacgcgtctataacagtcctttcccgctggtggatatcaccatcacaccggatgacgaaatcatgcaacatcggcggattgcgattctcgaactactgcaaaaacatattcgccagcgcgacttaatgttattgcttgagcaactggtcacgctgatcgacgaagggtacactagcggaagtcagttagttgccatgcaaaactatatgctgcaacgcggtcatactgaacaagcggatttgttttacggtgtgttgagagacagggaaacgggaggggagtctatgatgacgctggcgcagtggtttgaagagaaagggattgagaaggggattcagcagggaagacaggaagtaagtcaggaattcgcccagcgtcttctgagtaaaggaatgtctcgggaagacgttgcagagatggcaaatttacctcttgctgagattgataaggtaattaaccttatttaagttacctgtgttatgacagatgacgtggggtaaattaataactggcgccatcagccgtagcgccagttaagtattacgccagctcgaccattttgttgtcgatcaggcgagcatcgccaagccaggcggctaccagaattactgcccgtttgctggtttcagaaacttccagcaatgtgtcggcatcgcgaatctgaatatcatcggcgcggaagcctttttcattcagttcttgccccgcaatggtaataatttcatcgagatcccgttccccagcctgcaatttgtcagcaatgctacttaaaactttgtacagaccaggcgcaattttgcgttgttccgccgtcagataaccgttacgggaacttagcgccagaccgtctttggcgcgcataattggcacaccgacaatctcaatatcgaagcccatatcggcaaccattttgcggatcagcgccagttgctgaaaatctttttcaccgaagcaggcgatgtccggctggaccaggttgaacagcttgctgacaatagtgctaacgccgcgaaaatgtcccggacggctggcaccttccagcatggtgctaaggccaggaacgtcaacgtaagtgtgggtttcagtaccgttcgggtagatctcttttacgctaggggcgaaaactaaatccactttacgtttgtttagcttctcgcagtcctcctgcaaggtccgtggataacgagccagatcttccgggcggtcgaactgcatcgggttaacgaaaatactgacgacgaccacatcggcgcgggctttggcttcgtcgaccagcttcatatggccatcgtgcaggttacccatggtaggcaccagcgccacgcgcttgccttccatacgcaggcggcgaatttgctgacgcagcagcggcagggtttcgataattaacacaacgtgactccttaatggaaactgtgttcttcgcccggataaacgccggactccacttcagccatatactgccgcacagccgcgcggatgtcgcccgtttcggcgaggaaatttttagcgaatttaggaatgtgaccgccggtaataccaaaggcgtcgtgcatcacgaggatctgcccgtcagtgacgttgcctgcgccaatgccaataaccgggatcgccagtgcttcggtaatacgttttgccagttcaaccggcacgcattccagcaccagcagctgtgccccagcagcttctaaggctaatgcatcgctgagcagttgatcgcccgcttcatcgccgcgcccctgaactttgtagccaccgaaaatattcacactctgtggtgttaaacctaagtgaccacatacaggaacggcacgttcggtcagcatttgtacggtttctaccagccactcaccgccttcaattttgaccatgttagcaccggcacgcataaccgttgcggcgttttcgaaggcttgttccggcgtggcatacgccataaacggcaggtcagccagcagcaggcagtttggtgcgccgcgacgtacggcggcagtgtggtaggcgatatcggcaacggtaactggcagggtggagtcgtgcccctgaaccgtcatgcccaggctatcgcccaccagcatgacgttaagcccttcatcagcaaagagtttggcgaagctatagtcataagcggtgatggtcgcgaaacgttttttttcctgtttgtacttctgcagtaaggagatggtggtcggtttcataacgtatcctgataaattgatgttgtgctgtctggcattttatcagtcacattggtgggggcaatgatttatccgtagcagcactgccagaaggtgacagtgctgctacgttatcagggataggttacctggaaagtactggtggctttaaattcgccgggttcgatagcaatattcccgtcttgctttaatgttgcctggaaatgaagaggctgacttgtgccgttaccttgattagggtaaaccccatcggaggtgtcatcttcggtttcataatctatataaacagaattcgtatcattaggttttaatgtcattagcggatttttactggttgctaaaccttcaatgagtacgccaacgcctttggcggcagtgcttccagtaagcgtattaccaagcagttgtgtgttttgagtacctacttttccagtgacgagttttgtttcaatattacgcacacgaatacaattctgaaggctgatatcaaagggaacaggactagcgccatttttaattgtcccagagctatattctcccattctaaccgtactaccattgacacttggcccggtaagtatggaggtaaaacatgttggtaaggttaatttgacattattcagtgtgaaattgacataaatgtggttgctgtgatctacaacttttgtaccaggactgtaggccttaaagctataaaggtaattactactactggataactggacttgctgattaagtgtaggatcgaaattagtatctgtataaaattcaacagttatgttgtgtactataccaccaatagcccaaaacttatcgtagtcgtctgctttgttgcaacccttagtttgtagatcgctgtctgtgacggaaaagaaaaattcttggttggaaggatctccgatatagattcctgggctttgaatgtcagttattgtatcgtatgcagaccagaccctacttattaacatggtgtaatacagaccaggaacagatgtattaaatagtttatgtccgccataatctttaccactatagaccatggcattttcaatagttattggaccaggattcgctctgccagatgtattgcagtaaagaataccaccaccggtacctgtatccaggtaactccagtacatttttaccccagtcgggccgagctgcgtgggtttataaaaaaccaagttgcttgctgtacttgtgtaattaaaggtcatctgtgcggcagtggaggggcctcgatagttatcaactcctgcattatttcccacaataaaacttgtatatgcactgactgtattacaacaagaatacagtgctaaaaaaagaatgtacctgaagatagtcttcatttttactccaatgtttctttattgttatggtttgcgctgtttttgtttgttattcgtagtaaatatccactaacacatggctcataagttgaccagatgtaacactcaatgcaggatcgattttttgcattcgggtgctaaatttccaggaactaccattcatgtcatcgctcattactggataaacggaacgagatccgccactagcattaagaacattgaatgtattcgcgctatcctgagtagaaaatataactactcctacattacttgctccactgctaatttcattagcaaatatttgcctagagccagcagccatgacaccgctaagggctctaaaatcaatatgtaactgatttagcacatcgccagttccctgtaatgcacagtcggatacagtgatagtgaactcttttccacctggttgataactttcaggagtaacattaccactaaaatatcccaccccaacgacgccaagatcaatattaccctggttactgattccgcttttgcaggtgctgttttttacattggcaacaaggtcaatatcctgtccagcaatggctggacaggcgatgcaaaacagtaaactcagaaacagaattattctcttcatcagcttacgttgagtgggatgcatatatagttcctgaatctgtaagtctgttagttataggttactgtaaatgtggctggtgcagaaaacttacccgcagtgacattgtttacggttttatttttttccacgaccaggcgtgcactcatcggataataaacgaccgcattggctgcagtggagattgttacctcttgacttgctggtgttacacagctaaattgtgttgcactccctgttgccggagttacagtgctccagacttcaacggcgacagcacttgctttatctgcggctgtggaaccatttgcaaaccccgcaccgtcattagcagttccctcgcatgtggctcgcttggttaattttatttgcgcttttttattggggatacccgcacagtctttgaatttgagtttgaatgtttttactttggtcttggcattgatttcagaaatatatacatcaccaaaatcaacaacagaaatgtcctgatcagagtcatttactaatgtagcggtacaagtacccatttctacagtagtaataacggtcagtccaatactgtctgttgccgcataagagagtacgctgaacaaactggcagccaaaacgacactgctggataatccataacgtaaatttttaaatgtcatcataattatccttcttattgatagatgaaattaaacgtcgccagtgcacgaaaattccccggtacgccttgccctgcatctgtttcacgtagcgcaacggtcatttcaagacccttatcgggctgcatctcgtctgtgctccagcgtatcttttccgcactgttaggtttaaggaaagtggcatcatcagtagtccgttttttgaaacccataccgatattacttgtcgtgctagaactatcaccagactgcggtataataagcttaggactgctactacttgcatttccggtcagagtggtatcaatccaactgatgccactgctgcacccactggcaaccagtttaaaatcagcctgagattctgtcgttttattcgcgatcttatccagacccatcttagggattctcaatgtgtagttattattgccatcattcgtgacgttattaccagtaagtgtgatgttacaggttgtcgctttgacagtggctgtaaactctacattaatatccgttgcaaatacactgggacttaataatattcccatcagtatcactattttatgtggcgttgtttttatcatttgacgtcccttgtagttactgaatctgacaccgaattccattcagaataatagattgtgctattttttctgcttctgggctttgttgataatgcgcaagacaacttacgggtttactttgttcgagccatttaatgctgatatttccctgctgctcaataccacgaacaaatgcttgtccaccctgtccaacattaccaatgacattgccttgctcatcataaatatctgcagcaaatggaatatttttaccatcacttcgtgtgatgttcataatggcactttgcccttgcacggtttcaaaatcagcaaagacgacactaccctgacgcggtacagctactgcactggtactttttaattcaacatcgttctcaagatcgttgatatccagcgcgatacggttttcatgataaggagaaagagcgctggtgacaccataaccccatcgatcgatagtactgttgccataatttattcgcgctccttgagcacctggagcctgaactaccgccagtgtatcggagtcgctaaaactatcattactgaaagtcagtccaccgctatgcaatacaaaaccaccgtcggtgctgagagaaacttgacggctgttatcgctatttgcagaaatactacctgccagcgttccccatggactctcatagctggcataacccccaacataactcaaatctttgctggctttattcatcgtatagccagtattcacgctataactgacgcgagcgttatcgctatagccactgctgctaacgttgagttggttattacccttaaagtcactgcttatttgagtatcaatactctggaaaccactagtacgttgttcagtgccaagtaatttttcaattggaatggtgaaactaagataaacgctatcgtcagtgtcgccgtcttcattccaactacgctgggcactgacactgtagctgccccaggatgtactgttactgtagccaatagagtaattgctacgattttgtccggaagcccagtaatcggaccaacttccggaaagataaaaactaccgtaatcttttttctcaaatttcaacggttggttaatactgaccgtaacctgatttttcatgcgactgtaattacgcatggatttcggttcaagatcttgttcgggatgtttcacttcatcaattagagttagtgcatcattaagaccaaggtaattctgtgtgctatagcgataggccgcgatattcagactagtacttgtttcttcgaataacttgttccaggaaacacgataactttgcccctggtatgttttatcatccgggatacgaacattggaatgagtcacatcgaaagaaaatgcaccaacactagtattcagaccaagacctaacaaaccagcggtatagttattatcggttatctgaataccggtataacccgtcagatagttattcaggccgtagtagtagcttgcttgaaataaattaggctcatcctgaatatcatcttttaagacctgaccgccgctaatatcccaacgtccaacgccagggcgtaacatttgaacaacggaactgaaaggttggctgaatgtccgcttactgccatcggattcttcgatggtaacaataagatcgctgccgtacccactcggactcagatcatcaatgacgaaagcgcctggcggcaccgtcgtttcataaatcttatagccaccttgcgtaatagtgactttggcgttggtattggcaacgccatgaatgataggcgcaaagctggctaaagtcggaggcaacatgcggctgtcactgtataaacgaatgcctcggatactgacggaatcaaaggtttcgcccgtcgtataagactcaccaagaatgagttgagaacgcaggctggcgatatcacgctgaacataccgattcttaaaatcataattactgccagaatcggtcatccagttgtagttgccgctggcacgcagtcgccatgcacctaaattcatcccaccgttaaatgcagcataaatgctttcattttttcgaccaggggtttcactatgatatccgttgaggttgtaactcaacatggccgcattaatgccgttttcccataagcttggatcaacatagttttggtaatttttcattacccaggcttgaggaacgtctatatccagacgttgatcgttaacgtcataacgaacagaagcctgagggataatttccgtcaaattgaggcaattgccgagcgtttcatccctggcaagcagaacggctttttcgttatttatatcgggagaattaatatgaaactgcaataaattctttaatgtgatacaagcctgggcgttcttttttccttcaattgcgacaaatgtaatactttggttaatgattggttggtcgtttacataaacactgacgtcgtaaacacccggtatagcggggttaccttcactgtaccggctgagatcaatattagatgcattctgccccatcaggaaggtatggtcatattcaacgagttcagcactgaaagcagtattgcaatacagcagcgcgcaaaacgtggcgatacgggtcagatgatgataatttttagtatattctatagtcacgctatgcttcctgcggaattatatccttgcctgattacagcctggcattaccttcaattgcgccaccaaagtcattaatggcgtaaaaatgcacttttgcagaattcgctttgccattaaggccattgactttcatgacctcatcactaaatggtgcaatcattttcacatcaatcggatagcgtttaccgctagcttctaaatcaccactgctaaaagagacgtagtaaggggttggattggtcactcgtaaactcgccttaccttcactaccactccagaaccacttcagggctaacggggcttcagagggatttcccttcaatccatccgggcgatagaaaagttttatacgtgtgcgaaatgccagttgcagcaggctttgattcgcgaccttttctgcatctggttttggtggaacttccagtacgttaaaccagaacacgctctctctgtctttaggcagactggtgctggctgtgtacattaatttgattgtttgcccacgtttggcatcaatacggcttactggcggcgtagcagtaaaagggactgtaatactgccaggctcagcgttgtcatcgccagtatctaaccaactctggacaagcaacgggttattccctttattttccagacgtacgttgacacttttttgatcgcttttatatattacgcgagtaccgctaatgacaatgtccgcaatagagctactactaaaagccatacaggttacgaagcataaagctgttgtatgtttggtgttaaaaaacataaaccatccctgatagagttaattaaaacagggaataatataaaatagaaattattattccctgtatattcattcaatcaatttaactggtgaatacttactgataagtaatggtgtatgcagtgttagtttttacataaccagcagttgctgtttggtctgcgacggcacgaacgtaagacgctttaaaatcataaacagcagattttgtcgttgcatccagggctttagtatacacatcgccagggttgttaatttgaacctgtttgatagtggaaccatcaatattgtgtagagcgatattaacgccgtcagatgggttgttaatagacatgtcgttgttcaaagtccctttgctgttaccaaagaaaacagaaccgaaggtcattttagccgtgctacctggattcggatttgctttgctgcagtcaacggtgatgctgaaaggtttagctttagcgccaacggtgtcattcagtacgccagcatcgatttcaccaacggttgcggtttgcagcaggatcagaccatccttgttaccgccgtcaacgcgggtttcacaggtgttatcaacaaccagaccactgatatttaactgaccgccgtccatatcagcagaagcagtacctgcaaccatcgccagcataagaccagacagggcaaaacctaattttttagacataaaaatcctttaataaaattccattagtcagactacatgtttgaagaatgactattcatgacacaaataggagaaacaaatgttagatattaatgagcaatgatatttgttacccaaatttacaaccattgttcattaggtcgcctattgtgcactttagaagcttttgaacaaattaaatttacttaattcaaaattaagtaaaaataagttcacaagtgcaattggttagggtatggagatgggattgatatttatttataggaagttatattatttccgcaaagagatgtttaaactaaaatcgtaattaaggaaagagatgagatatgattttcagaaaatatttatattcgcaatataaataaattaccatttgtttaatttgtcaaatgctcttgtatgtaagatttgacgcaacatctccccatcaggaaacaccaactccggcgcgatttcaaacagcggccacagcataaatccacgattcttcatatcgtagtgcggaacggtcaggcgttcagtatttatcacttcattaccaaacagcatgatgtcgagatccagcgtgcgtggtccccagcgttcagctttgcggacgcgaccttgctgcaattcaatacgctgtgtgtgattgagtagctcttcaggtgcaagagaggtttccagcgccacggctgcgtttaagtaatcgggttgatcttgcggccccagcggtggggtgcggtaaaagctagaaacggtaagaatgtggctttcagggatatcgcctaatgctttcagggcagcattgacctgctccagcggagaggccagattgctgcctatggcaatatacgccactgtcatgcggtaccctcacgacgtggtgcgcgtttgcgtggacgacgagtacgacgacgcggactcggttcttcatccagctcgttgagcatccctttttggtctggtggcgcggaaacctggaactcaccccaccatttcaccagacgctgcagttcagcgttacgctcaacttcagctcgcaaggccaacaggtcataagccgcacggaacttaggatgctccagcagtttccatgcgcgtttaccctgacgacgggacatacgcaactgcaactgccagatatcgcgggttaatgtcgtcagacgtttcgggattgccagactacggcaggcttcgtccagcacgtcgttcatcgccagcgcgaaagcgtcgtgataggtcaggccgctttcctgggcgatcttctgtgccgtctccagcagtgggtaccagaacatggcggcaaacaggaacgccgggttcacgcgcatatcgttatggatacgcgtatcggtattcttcagcacctgttcaatgatccgctccatcgggctgtcgccattttccgtgaagtagcgggtaatggtcgggaacagcggctggaacagatgatattcacacaacagcttataggtttcgtaaccgtagcccgcttgtagcagtttaaggctttcttcaaacaggcgtgccggtgggatatcgttcagcagggtagcgaggcgagggatcggttctgcggtttccgggctgatgcgcatacccaatttggcggcaaaacgtaccgcgcgcagcatacgtaccggatcttcacggtagcgcgtttccgggttaccaatcagacggataacgccgtccttcagatccttcatgccgccaacgtaatcacggacggtaaaatccgctacgctgtaatacaggctgttgatagtgaaatcgcggcgctgggcgtcttcttcgatggagccgaaaatgttgtcgcgcagcaacatgccgttttgcccgcgttgggaggtcgtgcggtcgctgacgttaccttcgtggtgtccacggaaggtcgcaacttcgataatctccgggccaaacattacatgagccagacggaaacggcgacccaccaggcggcagttacggaacagtttgcgcacctgctcaggcgtggcgttagtggttacgtcaaaatctttcggctttttgccaagtaacaggtcgcgcacgccgccgccaaccagccaggcttcgtatcccgctttattgagcctgtacattaccttcagggcattttcactgatatctttgcgggaaatagcatactgctcacgcgggatcaccgtcacctgtggacgggcgactgcctgttcagcctcgctttcctcgcggcttagcaccttgcggcaaaaattagcgactcgggtaaaaatagtacacctcggtagtgtcaaacatcattcaggacaaaaaaatagcggctaatcatagctcagcaactcgcattactgaatgtactatttacaattgcgctctcgggcacggcggtaagccgccagtttttgacggcactctgaaggatttgctcgacgctgaaatcctgccagtgtgcttctgcctgctgccccagaaattgaagtgccgcgattagtaccgggcgtggatcgcctttcggcaacgcaggcgcatgattctgcttggaaagtttagcgccttgtggattaagcgccagcggcagatgaatgtaatctggcactttccagccaaaaagctggtacaggctgatttgccttactgttggttcaatcagatcagccccacgcactatttctgtaacgccctggaaatgatcatcaaccacaacagccaggttgtaggcgaacaacccatcacggcgatgaatgataaaatcttcccgtgccagtttttcgtcggcgtgaataatgccgcgcagctggtcagtaaattgcgtgaccggatgctgctggcggatacgcactgcggcgttgtctggtccatgatgcaacacccggcaatgaccgtcgtaaataccgccaatgctttgaatacgcgcacgcgtacaggtgcagtaataacttagtccttgttcatgtaaccaggcgagtgcttcacgataggcgtcgtgacgttggctttgccagagaacatcgccgtcccagtgcagaccgtaatgttccagctggcgcaggatagtttctgcggcaccgggaacttcacgaggcgggtcgatatcttctatgcgtaccagccagcgaccttgccgggcgcgagcctgcaaatagctgccgagcgcggcgatcagagagccaaaatgaagctcgccggaaggagagggggcgaagcggccaatatactgtgtgtctgtcatctctttgaacaaaaaataaggcgggagcatttcccgcctgtggtaaacgtgatggaacggctgtaattagccagccatctgtttttcgcgaatttcagccagcgttttgcagtcgatgcacagatcggctgtcgggcgcgcttccagacggcgaataccaatttcaacaccgcaggattcgcagtagccgaaatcttcgtcttccacttttttcagcgtcttctcgatctttttgatcagcttacgctcgcgatcgcggttacgcagttcgaggctgaactcttcttcctgggctgcacggtctaccgggtccgggaagttggctgcttcatcctgcatatgtgtaacggtgcgatcgacttcatccctgagttgattacgccatgcttccagaatacgacggaagtgcgccagctgggcttcattcatatactcttcgcccggcttctcctgatatggttccaccccagcgatggcgagaatactcagggagcttgttttacggttttgcccttcttgcatgttgcttctccttaacacgcactatcgatccccatgttcgggggaaaaatgaggccgctataaatagcagatgcttttccggatagcaattatctaaacgtaacacttgacaactgtgtgaggaaaagcgtatttgcgcacgcgaccagaatgtaaattaaccagttacttactttattacaatgtaaccggcagactttttttaagagccatgccttcagcagaaatttccgctttgtaagccagaatttctacccccctctgttgagcttcactcaatagttgcgcgtatttctcatcgatgtggcgcgcgggactaaaccgtgtaatggcactatgcagcacggcgaaaaagataaccgcacgctggccttcagccgctacgctcatcaactcccgaaggtgtttctgacctcgttcagtgaccgcatcgggaaaatatccctgttcgttctccgctaacgtaacgcttttcacttcaatatagcagtctggacggctatccgcctgcaacataaagtcaatacggctgcgttctgcgccgtattttacttcgcttttcaggctgctatagccactcagttcactaatactttcattaaggatagcctctttcgtcaacctgttagcccaaagcgtgttgacgcaaataaatgcgccgctctggctttgagttaattcccaggtgtgtgggtatttccgtttggtgttgtcactagtgctataccagacggtatcgccaggcgttgcacaaccggtcatcgcacccgtattcgggcagtgtagcgttaattcgcgaccatcgggtgtgatcacatcggctaaaaaacgtttgtaacgctgaattagcgtcgcgcgctgtagagggggagaaaattccattgcgacaatccttgttattgcgttagcgcccagcgttttagcggcgtgtagcgtgtgcgtccacgggcaaagctggaggcgtaaagggtgaactccgtcaccgcatagctccagttaaaacctggcggcgggattgtcaccgcctcgctggcgtcgcgcaataaggtaatatgtggatgaaacggacgattgctttgaaaacaaccgctgcgggcagcctgactacggagcatattcgccagctggattaagccgcgtggcggctgacgcatccctaaccacaccacacggctacgcagccattgtccggcgtcatcaagcgtgagtgtgaaaccaggttgacgaatccgtccggctaaaagagaaagcgccttctctttctcggcgctcacttcgcctaaaaatgccagagtcagatgcaaattatcggcggcgaccggacgtcccgcctcaggtgggaagtgtgtggcgcgccaatggataatctgttcgcggatttctgcaggtaagtcgatagcaaagaacagacgttgcggttcagacatgtgaggcactcggttatgaattaccgcgatgctacaatgtggcgcgaagaatgttaaccctctggagcgttttgtgagcagcttgcccgttgctgccgtcttacctgaattacttaccgctctcgattgtgcgccgcaggtattattaagtgcgccgaccggggccgggaaaagtacctggctgccgctgcaactgctggcgcatcccggcattaacgggaaaattatcctgctggagccgcgtcgtctggcggcgcgtaacgtcgcgcaacggctggcggagctgcttaacgaaaagccaggcgataccgttggctaccggatgcgtgcgcaaaactgcgtcgggccgaatacccgcctggaagtggttaccgaaggcgtgctgacgcgcatgatccagcgtgacccggaactgagcggtgttggactggtgatccttgatgaatttcatgagcgcagcttgcaggcggatttggcgttggcgctgttactcgatgtgcaacaaggtctgcgtgatgaccttaaactgctgattatgagcgctaccctggacaacgaccgcttgcagcaaatgctgccagaagcgcctgtcgtcatcagtgaagggcgcagctttccggttgaacgccgttatttaccgctgcccgcgcatcagcgttttgacgatgccgttgcggtagccaccgctgaaatgctgcgtcaggaaagcggaagtttactgttatttttacctggcgtcggagaaattcagcgtgtgcaggaacaactggctagccgcatcggcagtgatgtattgctctgcccgctgtatggcgcgttgagcctgaacgatcagcgaaaagcgatcctcccggcaccgcaagggatgcgcaaagtggtgctggcgaccaatattgctgaaaccagtttaaccattgaaggtattcgtctggtggtggattgtgcccaggagcgtgtggcgcgttttgatccgcgcacggggcttacgcgactgattactcaacgcgttagccaggcatccatgacgcagcgtgccgggcgcgccgggcgtctggagccgggtatcagcctgcatttaatcgccaaagaacaagcagaacgcgccgcggcgcaaagtgaaccggagatcttacaaagcgatctttccggtttgctgatggaattactgcaatggggatgcagcgatccggcgcagatgagctggctggatcaaccgccagtagtgaatctactggccgcgaaacgtctgttacaaatgctgggggcactggagggtgaacggcttagtgcgcaagggcaaaaaatggcagcgctgggtaacgatccgcgtttagcggcaatgctggttagcgcgaagaacgacgacgaagctgctaccgcggcaaaaattgccgccattctcgaagagccgccacggatgggcaatagtgacctgggcgtggcgtttagccgcaatcaaccagcctggcagcaacgtagtcagcaactgttaaaacgcttaaacgtacgtggcggtgaggcagacagtagccttatcgcgccgctacttgccggggcgtttgccgatcgcattgctcgtcgccgtgggcaagatggacgctatcaactggcaaacggcatgggagcgatgctcgatgccaacgacgcgctaagccgccacgaatggttgatcgcaccgttattattgcagggcagcgccagcccggatgcgcggattttactggcgctgctggtcgatattgatgagttagtacaacgctgcccgcagctggtacagcagtctgacactgtggagtgggatgacgcgcaaggtacgctgaaagcctggcgtcggctacaaatcggtcagttgacggtgaaagtgcagccgctggcgaaaccgagtgaagacgagttgcatcaggcgatgcttaatggcatccgtgataaaggtttaagcgtgctcaactggacggcggaagcggaacagctacgcttgcgtttgttatgcgccgcaaagtggttgccggaatatgactggccagcggttgatgatgaaagtttattggcagcgctggaaacgtggctgctgccacatatgactggcgtacatagtctacgcggcctgaaaagtctcgacatttatcaggcactacgcggattacttgattggggaatgcagcaacgtctggatagtgaattgcctgcgcattacactgtgccgacgggaagccggatcgccattcgttatcatgaagataacccgcccgcgctggcggtgagaatgcaagagatgtttggcgaggccaccaatccgacgatcgcccaggggcgcgtgccgctggtgctggagttgcttagtcctgcccaaaggccattacaaatcacacgagatttgagcgacttctggaaaggagcgtaccgtgaggtgcaaaaagagatgaaagggcgttatcccaaacatgtctggccggacgacccggcaaatactgcaccgacgcgacggacgaaaaagtatagctaaggttggttttctccctctccctgtgggagagggccggggtgagggcatcagcgcgcacgttcaccctcaccctaaccctctccctcaagggagaggggaccgatcgagcacaaattttgagagatatcttcttctgtcttgtaacagaagaacagaaaatcgggcttttgcgcctgaatattgcggagaaaaagcatggccgggaatgaccgcgagccaattggacgcaaagggaaaccgacgcgtccggtcaaacaaaaggtaagccgtcgtcgttacgaagatgacgatgattacgacgattatgatgactatgaggatgaagaaccgatgccgcgcaaaggtaagggcaaaggcaaagggcgtaagcctcgtggcaaacgcggctggctatggctactgctaaaactggctatcgtttttgccgtgctgatcgccatttacggcgtttatctcgatcaaaaaattcgtagccgtattgatggcaaggtctggcaactgcctgcggcagtttatggccgaatggtcaatcttgagccagacatgaccatcagcaagaacgagatggtgaagctgctggaggcgacccagtatcgtcaggtgagcaaaatgacccgtcctggcgaatttaccgtgcaggccaacagcattgagatgattcgccgtccgtttgatttcccggacagtaaagaaggacaggtgcgcgcgcgtctgacctttgatggcgatcatctggcgacgatcgtcaatatggagaacaaccgtcagttcggtttcttccgtcttgatccgcgtctgatcaccatgatctctagcccaaacggtgagcagcgtctgtttgtgccgcgcagtggtttcccggatttgctggtggatactttgctggcgacagaagaccgtcatttttacgagcatgatggaatcagtctctacagtatcggacgtgcggtgctggcaaacctgaccgccggacgcacggtacagggtgcgagtacgctgacgcaacagctggtgaaaaacctgttcctctccagcgagcgttcttactggcgtaaagcgaacgaagcttacatggcgctgatcatggacgcgcgttacagcaaagaccgtattcttgagctgtatatgaacgaggtgtatctcggtcagagcggcgacaacgaaatccgcggcttcccgctggcaagcttgtattactttggtcgcccggtagaagagctaagcctcgaccagcaggcgctgttagtcggtatggtgaaaggggcgtccatctacaacccgtggcgtaacccaaaactggcgctggagcgacgtaatctggtgctgcgtctgctgcaacagcaacagattattgatcaagaactctatgacatgttgagtgcccgtccgctgggggttcagccgcgcggtggggtgatctctcctcagccagcctttatgcaactggtgcgtcaggagctgcaggcaaaactgggcgataaggtaaaagatctctccggcgtgaagatcttcactacctttgacagcgtggcccaggacgcggcagaaaaagccgccgtggaaggcattccggcactgaagaaacagcgtaagttgagcgatcttgaaactgcgattgtggtcgtcgaccgctttagtggtgaagttcgtgcgatggtcggaggttctgagccgcagtttgcgggctacaaccgtgcgatgcaggcgcgtcgtagcattggttcccttgcaaaaccagcgacttatctgacggccttaagccagccgaaaatctatcgtctgaatacgtggattgcggatgcgccaattgcgctgcgtcagccgaatggccaggtctggagtccgcagaatgatgaccgtcgttatagcgaaagcggcagagtgatgctggtggatgcgttgacccgtagcatgaacgtgccgacggtaaatctggggatggcgctggggctgcctgcggttacggagacctggattaaactgggcgtaccgaaagatcagttgcatccggttccggcaatgctgctgggggcgttgaacttaacgccaatcgaagtggcgcaggcattccagaccatcgccagcggtggtaaccgtgcaccgctttctgcgctgcgtagcgtaatcgcggaagatggcaaagtgctgtatcagagcttcccgcaggcggaacgcgctgttccggcgcaggcggcgtatctgacactatggaccatgcagcaggtggtacaacgcggtacgggtcgtcagcttggggcgaaatacccgaacctgcatctggcagggaaaacagggactaccaacaataacgtagatacctggtttgcgggcattgacggcagcacggtgaccatcacctgggtcggccgtgataacaaccagccgaccaaactgtatggtgccagcggggcaatgagcatttatcagcgttatctggctaaccagacgccaacgccgctgaatcttgttccgccagaagatattgcagatatgggcgtggactacgacggcaactttgtttgcagcggtggcatgcgtatcttgccggtctggaccagcgatccgcaaagcctgtgccagcagagcgagatgcagcagcagccgagtggcaatccgtttgatcagtcttctcagccgcagcaacagccgcaacagcaacctgctcagcaagagcagaaagacagcgacggtgtagccggttggatcaaggatatgtttggtagtaattaacatctaagcgtgaaataccggatggcgagttgccatccggtaaaataacatcccatctaagatattaaccctttcttttcatctggttgtttattaacccttcaggaacgctcagattgcgtaccgcttgcctgtaagactcaatgtaagccgtgccaaaatatgatggctaggacgagctagaacccgccagcgtttcgaatattatcttatctttataataatcattctcgtttacgttatcattcactttacatcagagatataccattccatataacggccctgtacgcctggacggataaagcgtttacgcgacaacggatgcccgatgcgacgctggcgcgtcttatcgggcctacaaacggccccgaatcgtaggtcggataaggcgttcacgccgcatccgacaaaccatgctggatcacaacttcgcaaacacccgacgtgcagcatcgatggtgttattgatatcttccatgctgtgcgccacggacataaagcccgcttcaaacgcactcggtgccaggtaaacaccttcgtccagcatcatatggaagaaacgcttaaagcgttccacgtcacaggccatcacatcctgatagcacgtcacggactcggcgtcggtaaagaaaataccgaacatgccgccaacgtggttaacgaccagcggaattccggcttcttctgccgcttccagcagaccttctgccagacgtgttgtcagctcatccagcgtttcgtgaacgcccggctgcgcgacttcattcagacaggcgaaacccgctgccatcgcaatcgggttaccggaaagcgtacccgcctgatagaccggacccgtcggggccagcgcatccattacatcacgacgaccaccgaatgcgcctaccggcattccaccgccgatgattttgccgaggcaggttaaatctggcactacgccgtaataatcctgtgcgccagctagcgctacgcggaaaccggtcatcacttcatcgatgatcagcaacgcgccaaattcgtcgcacagcgcgcgcagacctggcaggaactctggcagcggcggaacacagttcatattgcctgccaccggctcgacgataatacaggcaatctcttgcgggtattgctcaaatgcggcgcgtacagaagccagatcattataagtacaggttaaggtatatttggcgaaatctgccggaacgcccgggctgtttggctggcctaacgtgagtgcgccagaaccggctttcaccagcaggcagtcagcgtgaccatggtaacacccttcaaatttaataattttgtcgcgaccggtaaaaccacgggccaggcggatggcgctcatggtcgcttcagtgccggagttcaccatgcgcaccatatccatggtcgggaccagttcggtcaccagttgcgccattttcacttccatttcggttggtgcaccaaagcttaaaccacgctcggcggcttcaatcacggcattgcggattgccggatggttatggcccagcaccatcggcccccaggaaccgacataatcgatataggctttgccatcaacatcgtacagataagcgccgtccgctttttcgataaacagtggagtgccgcccacgccagtaaaggcgcgaacaggggagttcacaccgccagggatcagctcgcgcgctgcgctgtaaagattttcagacttactcatggagggttcctgattcgtagaaaaagtgaatggctgctattctatgttattcataacaagttaaatactcgtcaaacatcaggctgcttgtactggtgcaatcctgatttcttagagtataaaagttttgtgcatttgaaacattacgctttgcaaaggattttcatggaacgtgcgagtaaaatgccgtcatcttatttgtatgaccaataagtgatcattggatgaaaactgatactccctctttagaaacaccgcaggccgcgcgcctgcgacgcagacaactgattcgccaacttcttgagcgcgataaaaccccgttagccattttgtttatggcggcagtcgtcggcacgcttgttgggctggcagcggttgcttttgacaaaggtgtcgcctggttgcagaaccaacgtatgggggcgctggtacatactgctgataattatccgcttctgttaaccgtcgcttttctctgtagcgcggtgctggcgatgtttggctactttttggtgcgcaaatacgcgccggaagcaggtggtagcgggatcccggaaattgaaggggcgctggaagatcaacgtcccgttcgctggtggcgtgtattgccggtgaagttctttggcgggctggggacactcggcggaggcatggtgttggggcgcgaagggccaaccgtgcagatcggcggtaacattggccgtatggtgcttgatattttccgcctgaaaggtgacgaagctcgccatacgctgctggcaaccggtgctgctgcggggctggctgcggcctttaacgcgccgctggcgggtattttgtttattatcgaagagatgcgtccgcagtttcgctatacgttaattagcattaaagcggtatttattggtgtcattatgagcaccattatgtaccggatttttaatcatgaagttgcgttgattgacgtcggtaaactttctgatgcgccgcttaatacgctgtggctttatctgatcctcggtattatttttggcattttcggccctatttttaataaatgggtgctggggatgcaggatttgctgcaccgtgtgcacggcggcaatattaccaaatgggtgctaatgggcggtgcgattggcggtctgtgtggattgctggggtttgtggcaccagcaacgagcggcggcggttttaacctgattcctatcgctaccgcggggaatttcagcatgggaatgctggtgtttatcttcgtcgcgcgggtcattaccaccttactctgcttctcttccggcgcgccgggcggtatttttgccccgatgctggcgctgggtactgtgctgggaaccgctttcggaatggttgccgttgagctgtttccgcaatatcaccttgaggcggggacgtttgctattgccggaatgggggcattactggcggcatctattcgcgcgccgttaacggggatcattctggttctggagatgaccgataactaccagctcattttgccaatgattattaccggtcttggcgcaacactattagcgcaatttaccggcgggaaaccgctatacagcgcgattcttgcgcgcacgctggcaaaacaggaagctgagcaactggcgcgaagcaaggccgcaagtgccagcgagaatacttgaacgaaataccagggtattagataatggcgattattattgggttagaatttgcccaattgccgatgtcgtttggagcaaaatatgagtgatgacgtagcactgccgctggagtttaccgacgcagcagccaacaaagttaaaagcctgatcgctgacgaagataacccgaatctgaaattacgcgtgtatatcaccggtggcggttgcagcggcttccagtatggtttcacctttgatgatcaggtgaacgaaggcgatatgaccatcgaaaaacagggcgttggcctggtggttgatccgatgagcctgcaatatctggtcggcggttccgttgattataccgaaggtctggaaggttctcgtttcatcgtgaccaacccgaacgcgaaaagcacctgcggttgcggttcttcctttagtatctaatctgttgttcatgtgccggataaactatccggcacatcttctctcttcaacgcccattctcatccagcgcaaacgtcggtagcttaagatgccaacgaatagccgccagccgaatcaatagcgtcacgaccatgcccatcatactggctgtttccagtggtacggaaaatgtgtaataagccgtagcgtggacaataccgccgataatacaggcagttgcgtagatttctgtacgtaaaatcatggggatttcgcgggccagaacatcacgaatgatcccgccgccaacgccagtaatgacgcccatacaaaccgcgattaacggaccggcttccgcattaaaggctttattcacgccaatgccgacaaacaccgccagaccaacggcgtccagcaccggcaacatccattttggtaagcgtcttggctggcgcaccagcacgatggtcagcatgctggtgaccattgcaacgaccagatcggtgggatctttcacccaaaataccgggccgtgatccagcgccatgtcgcgaattgtcccgccgcctactgcggttaccacgcccagtaccagaacaccaaaagggtccatacgcaattttccggctaacaaaacgccggagatggcaaataccgctgtgccgactatattcagccaatagacgagcattgttcaatccccactgagcacctgaaaaggtcaggcgttaatctacctgactaagcgcattacagagctgttgtgcagcgaggataatacgtgggcttgcacgttcaaaccagtcactcgtgagaggaataacgggaattttgagctgttcaccccagtattgtttgattttaggaatttggtccggtccgcctgtaatgacaatcgcctgtgggctgcgtgctaacacctgttcgcggctaacttgcggccagggaacccggctgtctttaaagatgttttctccgccacaaacttcgagtacctggttctgaatgctctcttttccactggtaaatggcggattaatgccgaattgcagaaaaacacgttttttaggtttatcagcatattgcgctttcaattgcgcgtactgatccagcagggattgcgcggcttgttcggccttgtctggttgcggactccagggggccagttgacgtaacgcattggcaatttgttcaatgcttgtcgcatcgacccacatcacttttattcccaggctagccagctggtcaacctgccgctcggcattacctccacgccaggcaatcaccagatcgggtttcagcgcgacaatgcgttccagattcatcccctgccaggtggaaacctgctcaatcttttgcgcttgtggaggatagtcggaatagctgctgaccccaaccggcgtgatcccggcggcaaaggcaagttcagtgttggcgggagaaagcgtgatgacgcgcggcgcggcgttgagccacagtggcgcaagaaaagacagggcgaccagcgccctgaacagactcttagccatgtgcaagtttctgcaccagactctcaaccatcaggctggactgtttagcggcaacagccaggaactcatcgaagctaagatgagactgttgatcggccacgtcggagatggcgcgtacgacaacaaacgggacgttgaaattgtggcagacatgggcgattgccgtcgcttccatctctacagcaatggcctgtgggaagttgtggcggattttcgccagaccaacagaaccgttgatgaaagcgtcgccgctaacaatcaggccacgtacagcgttaagattcagttcggcaatgcaggcctcagcggcagcgatcagtttatcgtcagctttaaagcctgccggacagcctggtaactgaccgtattcataaccaaatgccgtgacatccgcgtcgtgataacgtgcttcgtcgctgacaacgatatcgcccactttcaacgttggtgccaggccaccggcagaaccggtgttaataatcacatctggcttgcagtgttccaacagcaaagtggcacccagcgccgcagcgactttaccgatgccgcttttcagaagcgcaacctcggttccattcagttggccggtatagatttcgcaaccgccgagactgatagtttgacggttttcgattttgtcacgcagcagcgtaacttcttcttccattgcaccaatgatgccgattttcatagatttactcgcgataagcccgatttgaaggcatagtttaccatgcgcttacggggaagcgtatttctcacgcgggagaggacatggcacagattgatttccgaaaaaaaataaactggcatcgtcgttaccgtagtccgcagggcgttaaaaccgaacatgagatcctgcggatcttcgagagcgatcgcgggcgtatcatcaactctccggcaattcgtcgtctgcaacaaaagacccaggtttttccactggagcgcaatgccgccgtgcgcacgcgtcttacccacagcatggaagtccagcaggtggggcgctacatcgccaaagaaattttaagccgtctgaaagagcttaaattactggaagcatacggcctggatgaactgaccggtccctttgaaagcattgttgagatgagttgcctgatgcacgatatcggcaatccgccgtttggtcattttggcgaagcggcgataaatgactggtttcgccaacgtttgcacccggaagatgccgaaagccagcctctgactgacgatcgctgcagcgtggcggcactacgtttacgggacggggaagaaccgcttaacgagctgcggcgcaagattcgtcaggacttatgtcattttgaggggaatgcacaaggcattcgcctggtgcatacattgatgcggatgaatctcacctgggcacaggttggcggtattttaaaatatacccgtccggcgtggtggcgtggcgaaacgcctgagacacatcactatttaatgaaaaagccgggttattatctttctgaagaagcctatattgcccggttgcgtaaagaacttaatttggcgctttacagtcgttttccattaacgtggattatggaagctgccgacgacatctcctattgtgtggcagaccttgaagatgcggtagagaaaagaatatttaccgttgagcagctttatcatcatttgcacgaagcgtggggccagcatgagaaaggtagcctctttagcctggtggttgaaaatgcctgggaaaaaagtcgcagtaatagtttaagccgcagtacggaagatcagttttttatgtatttacgggtaaacaccctaaataaactggtaccctacgcggcacaacgatttattgataatctgcctgcgattttcgccggaacgtttaatcatgcattattggaagatgccagcgaatgcagcgatcttcttaagctatataaaaatgtcgctgtaaaacatgtgtttagccatccagatgtcgagcggcttgaattgcagggctatcgggtcattagcggattattagagatttatcgtcctttattaagcctgagcttaagtgactttactgaactggtagaaaaagaacgggtgaaacgtttccctattgaaagccgcttattccacaaactcagcacgcgccatcggctggcctatgtcgaggctgtcagtaaattaccgagtgattctcctgagtttccgctatgggaatattattaccgttgccgcctgctgcaggattatatcagcggtatgaccgacctctatgcgtgggatgaataccgacgtctgatggccgtagaacaataaccaggcttttgtaaagacgaacaataaatttttaccttttgcagaaactttagttcggaacttcaggctataaaacgaatctgaagaacacagcaattttgcgttatctgttaatcgagactgaaatacatgaaaaaaaccacattagcactgagtgcactggctctgagtttaggtttggcgttatctccgctctctgcaacggcggctgagacttctagtgcaacgacagcccagcagatgccaagccttgcaccgatgctcgaaaaggtgatgcctagtgtggtcagcattaacgtagaaggtagcacaaccgttaatacgccgcgtatgccgcgtaatttccagcagttcttcggtgatgattctccgttctgccaggaaggttctccgttccagagctctccgttctgccagggtggccagggcggtaatggtggcggccagcaacagaaattcatggcgctgggttccggcgtcatcattgatgccgataaaggctatgtcgtcaccaacaaccacgttgttgataacgcgacggtcattaaagttcaactgagcgatggccgtaagttcgacgcgaagatggttggcaaagatccgcgctctgatatcgcgctgatccaaatccagaacccgaaaaacctgaccgcaattaagatggcggattctgatgcactgcgcgtgggtgattacaccgtagcgattggtaacccgtttggtctgggcgagacggtaacttccgggattgtctctgcgctggggcgtagcggcctgaatgccgaaaactacgaaaacttcatccagaccgatgcagcgatcaaccgtggtaactccggtggtgcgctggttaacctgaacggcgaactgatcggtatcaacaccgcgatcctcgcaccggacggcggcaacatcggtatcggttttgctatcccgagtaacatggtgaaaaacctgaccagccagatggtggaatacggccaggtgaaacgcggtgagctgggtattatggggactgagctgaactccgaactggcgaaagcgatgaaagttgacgcccagcgcggtgctttcgtaagccaggttctgcctaattcctccgctgcaaaagcgggcattaaagcgggtgatgtgatcaccagtctgaacggtaagccgatcagcagctttgccgcactgcgtgctcaggtgggtactatgccggtaggcagcaaactgaccctgggcttactgcgcgacggtaagcaggttaacgtgaacctggaactgcagcagagcagccagaatcaggttgattccagctccatcttcaacggcattgaaggcgctgagatgagcaacaaaggcaaagatcagggcgtggtagtgaacaacgtgaaaacgggcactccggctgcgcagatcggcctgaagaaaggtgatgtgattattggcgcgaaccagcaggcagtgaaaaacatcgctgaactgcgtaaagttctcgacagcaaaccgtctgtgctggcactcaacattcagcgcggcgacagcaccatctacctgttaatgcagtaatctccctcaaccccttcctgaaaacgggaaggggttctccttacaatctgtgaacttcaccacaactccatacatcttcatcatcctttaggcatttgcacaatgccgtacgttacgtacttccttatgctaagccgtgcataacggaggacttatggctggctggcatcttgataccaaaatggcgcaggatatcgtggcacgtaccatgcgcatcatcgataccaatatcaacgtaatggatgcccgtgggcgaattatcggcagcggcgatcgtgagcgtattggtgaattgcacgaaggtgcattgctggtacttagtcagggacgagtcgtcgatatcgatgacgcggtagcacgtcatctgcacggtgtgcggcaggggattaatctaccgttacggctggaaggtgaaattgtcggcgtaattggcctgacaggtgaaccagagaatctgcgtaaatatggcgaactggtctgcatgacggctgaaatgatgctggaacagagccggttgatgcacttgttggcgcaggatagccgtttgcgggaagaactggtgatgaacctgattcaggcagaggagaatactcccgcacttactgaatgggcgcaacggctggggatcgatctcaatcaaccgcgagtggtggctattgttgaggtcgacagcggtcagcttggcgtggacagcgcaatggcggagttacaacaactgcaaaacgcgctgactacgcccgagcgtaataatctggtggcgattgtcagcctaaccgaaatggtggtgttgaaaccggcgttgaactcttttgggcgctgggatgcagaagatcatcgtaagcgagttgaacaactgattacccgcatgaaagagtacggccagctgcgttttcgcgttagtctgggcaactattttaccggtcctggcagtattgcccgatcctatcgtacggcgaaaacgacgatggtggtgggtaaacagcggatgccagaaagtcgctgctatttttatcaggatctgatgttacctgtgttactcgacagtttgcgtggcgactggcaggccaacgaactggcgcgaccgctggcgcggctgaaaacgatggacaataacggcttgctgcgacgaacgctggcggcgtggtttcgccacaatgtgcaaccgctggcaacgagtaaggcgttgtttattcatcgtaataccctggagtatcggcttaatcgtataagcgaactgaccgggcttgatttgggcaattttgatgacaggttgctgctgtatgtggcgttacaactggatgaagagcggtaagttatgcgttaaggttgaggcggcgctggctcattcccctcagcccgaagggtagaggggaatgcccgaattaaccgtcagttcgggattatttacgcgttagtttttccagatcggcttcaatctcgctgatcttattggttacgacactctccaggtgacgtaagtcgtcgaggatcttacgcttaagatcaacttcgctgcggtcacgctggcagatttgatcaagctcatcaatgatataccgtagattcgggctgatttcctggacttctttataaccctgacccacaccatcagcgacgaccgttttacgctgacgcggatatttaaacttaacgctcttggcgaaaaactcgcctttgtctttctggaaatagattttcagaatatcgttgttggcttcctgccggaggctgtaacgatcaatttcttcaggattggtaatacccagacttttcagattgtcgtacatagcgttacctcaaaatgagtcagtaaattgtgcttattttagcatttggcctggcccgcccggctcgactgtgatcgcagaaagcctttttcttccagacttctatcatggcgtaaaaatcaaaaaattacctgctttattctggtgataaaattcacgatttacaccagttccagcatcgttacttccgggcggcagttcagacgcaaaccatacaaactgcccacgccacgggttgtgtagatgtgtctttcgccaaaggcatttaatccggcgacgtaacgtttatcttcgacaggggcaaaaggttcaccaaccaacggtacgcgcagttgcccgccgtgagtatggccgcacagcatcagatcccagggttcatcacgcatgacttctttgctgtcgggattatgcgccagcaccagtcttggcagattggcttcgctggcgggaggcggtttgcattgtccggcccataagtcaccagtgcctaccagttcgaattgcctgttcggcgtggcgatcaccgtagcctggttaaacaacaccgtgatgcccgcacttttcaacgtctcgccaattaagtgatttttttctgtaccaacagggcgatcgtggttgccgaagcaggcaaacgtcggcgcacattcggcaaggggggagagtacgtcactaaacgcgctaaaattcaggctcatatcaaataatacgtaatcgccgcccagtaatatcaaatcgggcttttgttctatgccaagagcaatcgcgtcagaaatcaggcttaaaggaacaaaacgagagtaatggagatcggccagaaaaagaattttgaatggtgctgcgttgtctttaaaaaaggcgaggcggtgacggattaattcaaaccagcctggctcacagtaatgcatataaccgaaaccactgctcgtggctatcgtcgcggcagtagcctgcaaaaatcggcggcgactaatcatcgctcatccctgcaaaaaaatcgggcagcgtcgtgctgcccgtgtgcatacttttagtcgatggtacgcagcagttcgttaatgccgactttgccgcgagttttcgcgtcaactttcttaacgataaccgcacagtagaggctgtatttgccatctttactcggcagattaccactaacaaccacagaccccgccggaacgcgaccgtagtggatttcgccggtttcacggtcgtaaatacgggtgctctgaccaatgtatacgcccatggaaatgacggaaccttcttcgacaatcaccccttcaaccacttcagagcgcgcgccgatgaagcaattatcttcaatgatggttgggttagcctgcagcggttccagcacgccgccgatgcccacgccaccggaaaggtggacgtttttaccaatctgcgcacaagaaccgacggtcgcccaggtatcaaccatggtgccttcatcaacatatgcgccgatgttgacgtaagacggcatcagcacggtgttacgggcaataaacgcaccctgacgtaccgccgctggtggcacaacgcggaagccttctttctggaaacgtgcttcgtcgtagtcggcgaatttcatcggcactttgtcgaagtagcggctttctgccccttcgatcacctgattatcattaatacggaaagagagcagcaccgcttttttcaaccactgatgcgtcacccactgaccgtcaattttttccgctacacgcagtgcgccggaatccagcagggcgatcacctgatttaccgcttcgcgggtaacggtgtctgcattggctggcgtgatctcggcacggcgttcaaaagcggtttcaataatgttctgtaactgctgcattgttaaactcttttcatatcagtaaacacatcaccctttatcgtttggattgagggcctctgtcaaccgctgatgcacttcctgctgcaactcgttattaagcgcacgccggtcagcggtggcaattatgaataaatcttctactcgctcgccaatggttgtaattcgggcaccatgaaggctaattcccagatcggcaaaaattttcccgactcgcgccagcagtccaggttggtcgagggcgatcagttcgaggaagcttttgcggtcggtatgggtcggcaaaaacgttacttcggtttcaacagtaaaatggcgtaatttggcgggttggcgacggggctgcggtggctgccagctactttgcgtcagtacttgctccagaccaaaccgaataacctcatgacgatctgcggacagcgggttgccatcgggttccagcacgataaaggtatccatcgccataccgtcgcgagtggtgaaaatttgtgcgtcgtgaacacttaaattgcggcggtctaattcggcacagacggcggcaaacagataagggcggtccgggctccagataaaaatctcggtgcctccacgcgtagcctgcgggctaagcaataccagcggtttgcttaaatcatgctgtaataaatggcgggcatgccaggccagttgatttgggctatggcggacaaaatagttagcacgacagcgactccaaatttggtgcagcgcctcttcgtcgatgttatccatgcgcagtagtgccagtgcctggagttggtgatggcgaacccgttcgcgcatatccggcgtgttttgcattccgcgtcgtagctgcttttcggtggcaaagtagagctcacgcaacagactttgcttccagctattccacagcgtttcgttggtggcgcaaatgtcagccacagtcaggcataccagatagcgcagacgattttccgtttgcacttcttcggcaaactgcttgatgacttccgggtcctgaatatcgcggcgttgggcggtcacgctcatcaacaggtgctggcgaaccagccaggcgaccagctgtgtttcgcgactgttcagcccgtggagttcggcaaaatgcactacatcctgagcaccgagaatggagtggtcgccgccgcgtcctttggcgatatcgtgaaacagcgcggcgatgaaaatcagctcagtactcggcaggcgcggccagacgtccacacacaacggatggcgctggcgcgtttcttcactggcaaaactctccagtttcagcatcacgcggatagtatgttcatccaccgtgtaggcgtggaacagatcaaactgcatctgcccgacgatatggctccattgcggcatatacgcgccgagcacgctatggcgatgcattggcaatagcccgcgccgcaccgctccggggtgacgcagaatgctcaaaaacagttttcgtgcttccggaatattacacagcggttgttgcagatggcgacgggcatggcgtaactggcgcagcgtggtggagtaaatgccggtgatcgcactgttgtgcaccatggtgtagaacatacgcaagatggcttccggctggcgcataaatagtgtttcatcacgcaggtcgattagcgtaccgcgtagctgaaactcatcgtcgattggacgtggtttttcgtcggcgggaagggcgaggatggcttcatcgaacagttgcagcagcatctggttgagttcactgacgcggcgtgtaacgcggaagtaatccttcatcatccgctcgaccggttcgttaccttcaccactgtaattcagacgctgggcgacgctaagctggcgatcgaataacaggcgattatcgtaacggctgacgaccagatgcagggcaaagcgaatacgccacaatatatgcagacattcgtttaattccgcccgctccgcactggttaagaagccaaacccgaccatttcatccaggcttgttgcgccaaaatgacggcgggccacccattgcagagtgtggatatcgcgcaagccgccagggctgcttttgatgtctggttcaaggttgtagctggtgccatggtaacgctgatggcgctggttctgttcttcaactttcgccgcgtagaacttgtcggaaggccagaatccttcgctgaaaatatgtttttgcagttcgaggaacagcgcaacatcgccaattaataagcgggattcgattaaattggtggcgacggttaaatcgcttaacccttccagcatgcactcttcaagcgtgcgcacgctatgaccgacttccagctttacatcccagagcagcgttaacagctcgcccactttttgcgcctgatcgtccgggagctttttacggcttaaaatcagtaaatcgacgtcactaagtggatgcagctcgccacgaccgtagccaccgacggcgaccaatgccaggtcggcaatctggctgaatcccgcttcaatccataatcgttgcaggagctggtcgataaactcggtgcgcgcctcaatcaactgttctgcagagatcccattgtcaaaggcatcacccagccaacgctggaaagtatcgatatgggcttttatcccaccgacggttaattcatcacggggccagacgcatggattttgcggttgaccgggcagggtggggagagcggtgtttgcgtactgttctggaagggtattcattgtgcgccacccataagattaaattatcgcattaaaaaagccggcattcgccggcttcatcttattcgtcgtggctgattatcgccgggatggtgtcatccttgcgtagcgtcagaatttcgcagccgttatcagtcaccacaatagtatgctcatattgtgcagacaagctgcgatctttggtttttaccgtccagccatctttcatggtgcggatctcttttttacccgcgttgaccattggctcgatggtgaacgtcatcccaggtttcagtacgacgttggtttcacgggagtcatagtgcagcacctgcggttcttcatggaagccgcgaccaataccgtgtccgcaatattcacgaacgacggagaagccttctgcttcgacaaatttctgaatcgccgcaccgatttcgcgcagattaatgcctggttttaccatgcgtagcgccaggtacaggctttcttgcgtgatgcggcacagacgttcgcccatgatggtcggcttaccgacgataaacattttgctggtatcgccgtggaaaccatctttgattacggtgacatcaatgttaacgatatcgccatctttcagcagcttagcatcgtccgggataccgtggcacaccacttcattaatagagatgcaaacggatttcggatagccgtgatagccgaggcaggcagaaaccgcgtgttgttcattaacaatgtaatcattacagatgcgatccagctcgccggtgctgacgcccggtttaacatacggttcgatcatctccagcacttcggcagccagtcggccagcgacgcgcattttttcgatatcttctggggtcttgatagagatagccattaattctgtccatcagcgtcggtgataccgacaatatatatgtaagtgccgtcaatggtatcacacccgggcaaattgagaatcattctgaatttcgccaaacgtgccactgaaggttttctataatagaaaattcgacgtctgatgctgtacacagcgccaacaattattggtgtccacgacgtatttgtggtataaagcgcgccggacttccgatccatttcgtatacacagactggacggaagcgacaatctcactttgtgtaacaacacacacgtatcggcacatattccggggtgccctttggggtcggtaatatgggatacgtggaggcataaccccaacttttatatagaggttttaatcatggcaactgtttccatgcgcgacatgctcaaggctggtgttcacttcggtcaccagacccgttactggaacccgaaaatgaagccgttcatcttcggtgcgcgtaacaaagttcacatcatcaaccttgagaaaactgtaccgatgttcaacgaagctctggctgaactgaacaagattgcttctcgcaaaggtaaaatccttttcgttggtactaaacgcgctgcaagcgaagcggtgaaagacgctgctctgagctgcgaccagttcttcgtgaaccatcgctggctgggcggtatgctgactaactggaaaaccgttcgtcagtccatcaaacgtctgaaagacctggaaactcagtctcaggacggtactttcgacaagctgaccaagaaagaagcgctgatgcgcactcgtgagctggagaaactggaaaacagcctgggcggtatcaaagacatgggcggtctgccggacgctctgtttgtaatcgatgctgaccacgaacacattgctatcaaagaagcaaacaacctgggtattccggtatttgctatcgttgataccaactctgatccggacggtgttgacttcgttatcccgggtaacgacgacgcaatccgtgctgtgaccctgtacctgggcgctgttgctgcaaccgtacgtgaaggccgttctcaggatctggcttcccaggcggaagaaagcttcgtagaagctgagtaataaggcttgataactcccccaaaatagttcgagttgcagaaaggcggcaagctcgagaattcccgggagcttacatcagtaagtgaccgggatgagcgagcgaagataacgcatctgcggcgcgaaatatgaagggggagagcccttatagaccaggtagtacacgtttggttagggggcctgcatatggccccctttttcacttttatatctgtgcggtttaatgccgggcagatcacatctccgaggattttagaatggctgaaattaccgcatccctggtaaaagagctgcgtgagcgtactggcgcaggcatgatggattgcaaaaaagcactgactgaagctaacggcgacatcgagctggcaatcgaaaacatgcgtaagtccggtgctattaaagcagcgaaaaaagcaggcaacgttgctgctgacggcgtgatcaaaaccaaaatcgacggcaactacggcatcattctggaagttaactgccagactgacttcgttgcaaaagacgctggtttccaggcgttcgcagacaaagttctggacgcagctgttgctggcaaaatcactgacgttgaagttctgaaagcacagttcgaagaagaacgtgttgcgctggtagcgaaaattggtgaaaacatcaacattcgccgcgttgctgcgctggaaggcgacgttctgggttcttatcagcacggtgcgcgtatcggcgttctggttgctgctaaaggcgctgacgaagagctggttaaacacatcgctatgcacgttgctgcaagcaagccagaattcatcaaaccggaagacgtatccgctgaagtggtagaaaaagaataccaggtacagctggatatcgcgatgcagtctggtaagccgaaagaaatcgcagagaaaatggttgaaggccgcatgaagaaattcaccggcgaagtttctctgaccggtcagccgttcgttatggaaccaagcaaaactgttggtcagctgctgaaagagcataacgctgaagtgactggcttcatccgcttcgaagtgggtgaaggcatcgagaaagttgagactgactttgcagcagaagttgctgcgatgtccaagcagtcttaattatcaaaaaggagccgcctgagggcggcttctttttgtgcccatcttgtaaattcagctaacccttgtggggctgcgctgaaaagcgacgtacaatgtcgctagtattaattcatttcaatcgttgacagtctcaggaaagaaacatggctaccaatgcaaaacccgtctataaacgcattctgcttaagttgagtggcgaagctctgcagggcactgaaggcttcggtattgatgcaagcatactggatcgtatggctcaggaaatcaaagaactggttgaactgggtattcaggttggtgtggtgattggtgggggtaacctgttccgtggcgctggtctggcgaaagcgggtatgaaccgcgttgtgggcgaccacatggggatgctggcgaccgtaatgaacggcctggcaatgcgtgatgcactgcaccgcgcctatgtgaacgctcgtctgatgtccgctattccattgaatggcgtgtgcgacagctacagctgggcagaagctatcagcctgttgcgcaacaaccgtgtggtgatcctctccgccggtacaggtaacccgttctttaccaccgacagtgcagcttgcctgcgtggtatcgaaattgaagccgatgtggtgctgaaagcaaccaaagttgacggcgtgtttaccgctgatccggcgaaagatccaaccgcaaccatgtacgagcaactgacttacagcgaagtgctggaaaaagagctgaaagtcatggacctggcggccttcacgctggctcgtgaccataaattaccgattcgtgttttcaatatgaacaaaccgggtgcgctgcgccgtgtggtaatgggtgaaaaagaagggactttaatcacggaataattcccgtgatggataaataagggtaagattccgcgtaagtatcgcgggggcgtaagtctggttataaggcgttattgttgcaggcagtttggtcacggccagcgcgcagcaaccggagcgtacaaaagtacgtgaggatggcgagcactgcccggggccaaaatggcaaataaaatagcctaataatccagacgattacccgtaatatgtttaatcagggctatacttagcacacttccactgtgtgtgactgtctggtctgactgagacaagttttcaaggattcgtaacgtgattagcgatatcagaaaagatgctgaagtacgcatggacaaatgcgtagaagcgttcaaaacccaaatcagcaaaatacgcacgggtcgtgcttctcccagcctgctggatggcattgtcgtggaatattacggcacgccgacgccgctgcgtcagctggcaagcgtaacggtagaagattcccgtacactgaaaatcaacgtgtttgatcgtagtatgtctccggccgttgaaaaagcgattatgacgtccgatcttggcctgaacccgaactctgcgggtagcgacatccgtgttccgctgccgccgctgacggaagaacgtcgtaaagatctgaccaaaatcgttcgtggtgaagcagaacaagcgcgtgttgcagtacgtaacgtgcgtcgtgacgcgaacgacaaagtgaaagcactgttgaaagataaagagatcagcgaagacgacgatcgccgttctcaggacgatgtacagaaactgactgatgctgcaatcaagaaaattgaagcggcgctggcagacaaagaagcagaactgatgcagttctgatttcttgaacgacaaaaacgccgctcagtagatccttgcggatcggctggcggcgttttgctttttattctgtctcaactctggatgtttcatgaagcaactcaccattctgggcagcaccggcagcattggttgcagcacgctggacgtggtgcgccataatcccgaacacttccgcgtagttgcgctggtggcaggcaaaaatgtcactcgcatggtagaacagtgcctggaattctctccccgctatgccgtaatggacgatgaagcgagtgcgaaacttcttaaaacgatgctacagcaacagggtagccgcaccgaagtcttaagtgggcaacaagccgcttgcgatatggcagcgcttgaggatgttgatcaggtgatggcagccattgttggcgctgctgggctgttacctacgcttgctgcgatccgcgcgggtaaaaccattttgctggccaataaagaaagtctggttacctgcggacgtctgtttatggacgccgtaaagcagagcaaagcgcaattgttaccggtcgatagcgaacataacgccatttttcagagtttaccgcaacctatccagcataatctgggatacgctgaccttgagcaaaatggcgtggtgtccattttacttaccgggtctggtggccctttccgtgagacgccattgcgcgatttggcaacaatgacgccggatcaagcctgccgtcatccgaactggagcatggggcgtaaaatttctgtcgatagcgctaccatgatgaacaaaggtctggaatacattgaagcgcgttggctgtttaacgccagcgccagccagatggaagtgctgattcacccgcagagtgtgattcacagtatggtgcgctatcaggacggcagtgttctggcgcagctgggggaaccggatatgcgtacgccaattgcccacaccatggcatggccgaatcgcgtgaactctggcgtgaagccgctcgatttttgcaaactaagtgcgttgacatttgccgcaccggattatgatcgttatccatgcctgaaactggcgatggaggcgttcgaacaaggccaggcagcgacgacagcattgaatgccgcaaacgaaatcaccgttgctgcttttcttgcgcaacaaatccgctttacggatatcgctgcgttgaatttatccgtactggaaaaaatggatatgcgcgaaccacaatgtgtggacgatgtgttatctgttgatgcgaacgcgcgtgaagtcgccagaaaagaggtgatgcgtctcgcaagctgaggataatccggctacagagagtcgcgctatttgttagcgtagggcttcagtgatatagtctgcgccatctgatcgtaagtagttggctttataaggtcagatatgccgtggttttacacggcttttttttgtataggcttcagtattcctgagtaccgtaaaccctgtcagggaataaaaaacgcgtgatgttgtctgctactcaaccacttagcgaaaaattgccagcgcatggctgccgtcatgttgcgatcattatggacggcaatggccgctgggcaaaaaagcaagggaagattcgtgcctttgggcataaagccggggcaaaatccgtccgccgggctgtctcttttgcggccaacaacggtattgaggcgttaacgctgtatgcctttagtagtgaaaactggaaccgaccagcgcaggaagtcagtgcgttaatggaactgtttgtgtgggcgctcgatagcgaagtaaaaagtctgcaccgacataacgtgcgtctgcgtattattggcgataccagtcgctttaacagccgtttgcaagaacgtattcgtaaatctgaagcgctaacagccgggaataccggtctgacgctgaatattgcggcgaactacggtggacgttgggatatagtccagggagtcaggcaactggctgaaaaggtgcagcaaggaaacctgcaaccagatcagatagatgaagagatgctaaaccagcatgtctgtatgcatgaactggcccctgtagatttagtaattaggactgggggggagcatcgcattagtaactttttgctttggcaaattgcctatgccgaactttactttacagatgttctctggcccgatttcgatgaacaagactttgaaggggcgttaaatgcctttgctaatcgagagcgtcgtttcggcggcaccgagcccggtgatgaaacagcctgatgggggtcgcttttgctgaagtatcgcctgatatctgcttttgtgttaatacccgtcgtcatcgcggcgttgtttctgttgccgccggtggggttcgccattgtaacgctggtggtctgcatgctggcagcgtgggaatggggacagcttagcggttttaccactcgtagccagcgagtatggttggcggtgttatgcgggttattgttggcgctgatgctttttctgttgccggaatatcaccgaaatattcatcaaccgctggttgaaatcagtctttgggctagcctgggttggtggattgtcgcgctattgctggtgctgttttacccaggttccgcagcaatctggcgtaactctaaaacattgcgccttatttttggcgtgctaaccattgttcccttcttctggggcatgctggcgttacgggcctggcactatgacgagaatcattacagtggcgcaatatggttgctctatgtcatgatcctggtatggggcgctgactccggcgcatatatgtttggcaaattgtttggtaaacataagctggcaccgaaggtttctccgggtaaaacctggcaaggctttatcggtggactcgctactgcagcggtaatcagttggggttatggcatgtgggcgaatctcgacgtcgctcccgtcaccttactcatttgctctattgtcgcagcgttagccagtgtgctcggcgatctgaccgagagtatgtttaagcgtgaagcaggaattaaggacagcggtcatttaattccaggacacggtggtattttagatcgtattgatagcctgacggctgcggtaccggtctttgcttgcttgttgttactggtattcaggacgctttaacggaaggtaatatgctgagttttctctgggatttggctagcttcatcgttgcactgggtgtacttatcaccgtgcatgaatttggtcatttctgggttgcccggcgttgtggtgttcgcgttgagcgtttcagtatagggtttggtaaggcgctctggcggcgaactgataagctcggcaccgaatatgttatcgccctgatcccgttgggcggttatgtcaaaatgctggatgagcgcgcagaaccggtcgttccggaactccgccaccatgccttcaataataaatctgtcggccaacgagcggcgattattgccgcaggtccggttgcaaacttcatttttgctatctttgcctactggctggtttttattattggtgtgcctggcgtacgtccggtggttggcgaaatagcagccaatagcatagctgcggaagcacaaattgcaccaggtacggaactaaaagccgtagatggtatcgaaacgcctgattgggatgccgtgcgtttgcagttggtcgataaaattggcgatgaaagcaccaccattacagtagcgccatttggcagcgaccaacggcgggatgtaaagctcgatttacgtcactgggcgtttgagcctgataaagaagatccggtatctagcctggggattcgtcctcgtgggccgcaaattgaacctgtactggaaaatgtgcagccaaacagcgcggcaagcaaggcaggtttgcaagcaggcgacaggatcgttaaagtcgatggtcagcccttaacgcagtgggtgacctttgtgatgcttgtccgggataacccgggtaaatccttagcgttagaaatcgaaaggcaggggagtcccttgtctttgacattaatcccggagagtaaaccgggtaatggtaaagcgattggttttgtcggtattgagccgaaagtcattcctttgccagatgagtataaagttgtacgccagtatgggccgttcaacgccatcgtcgaagccacggacaaaacgtggcagctgatgaagctgacggtcagtatgctgggaaaattgatcaccggtgatgtgaaactgaacaacctcagtgggccgatctctatcgccaagggggctgggatgacagcggaactcggggttgtttattacctgccgtttcttgcgcttattagcgtgaacttagggataattaacctgtttccgttgcccgtacttgacggggggcatctgctgttccttgcgatcgaaaagatcaagggcggaccggtatccgagcgggttcaagacttttgttatcgcattggcagcattctgctggtgctgttaatggggcttgcacttttcaatgatttctctcggttatgagagttagttaggaagaacgcataataacgatggcgatgaaaaagttgctcatagcgagcctgctgtttagcagcgccaccgtatacggtgctgaagggttcgtagtgaaagatattcatttcgaaggccttcagcgtgtcgccgttggtgcggccctcctcagtatgccggtgcgcacaggcgacacggttaatgatgaagatatcagtaataccattcgcgctctgtttgctaccggcaactttgaggatgttcgcgtccttcgtgatggtgatacccttctggttcaggtaaaagaacgtccgaccattgccagcattactttctccggtaacaaaagcgtgaaagatgacatgctgaagcaaaacctcgaggcttctggtgtgcgtgtgggcgaatccctcgatcgcaccaccattgccgatatcgagaaaggtctggaagacttctactacagcgtcggtaaatatagcgccagcgtaaaagctgtcgtgaccccgctgccgcgcaaccgtgttgacctaaaactggtgttccaggaaggtgtgagtgctgaaatccagcaaattaacattgttggtaaccatgctttcaccaccgacgaactgatctctcatttccaactgcgtgacgaagtgccgtggtggaacgtggtaggcgatcgtaaataccagaaacagaaactggcgggcgaccttgaaaccctgcgcagctactatctggatcgcggttatgcccgtttcaacatcgactctacccaggtcagtctgacgccagataaaaaaggtatttacgtcacggtgaacatcaccgaaggcgatcagtacaagctttctggcgttgaagtgagcggcaaccttgccgggcactccgctgaaattgagcagctgactaagatcgagccgggtgagctgtataacggcaccaaagtgaccaagatggaagatgacatcaaaaagcttctcggtcgctatggttatgcctatccgcgcgtacagagcatgcccgaaattaacgatgccgacaaaaccgttaaattacgtgtgaacgttgatgcgggtaaccgtttctacgtgcgtaagatccgttttgaaggtaacgataccagcaaagatgccgtcctgcgtcgcgaaatgcgtcagatggaaggtgcatggctggggagcgatctggtcgatcagggtaaggagcgtctgaatcgtctgggcttctttgaaactgtcgataccgatacccaacgtgttccgggtagcccggaccaggttgatgtcgtctacaaggtaaaagagcgcaacaccggtagcttcaactttggtattggttacggtactgaaagtggcgtgagcttccaggctggtgtgcagcaggataactggttaggtacaggttatgctgttggtatcaacgggaccaaaaacgattaccagacctatgctgaactgagcgtaaccaacccgtacttcaccgtagatggcgtaagcctcggtggtcgtctcttctataatgacttccaggcagatgacgccgacctgtccgactataccaacaagagttatggtacagacgtgacgttgggcttcccgattaacgaatataacagcctgcgtgcaggtctgggttatgtacataactccctgtccaacatgcagcctcaggttgcgatgtggcgttatctgtactctatgggtgaacatccgagcacctctgatcaggataacagcttcaaaacggacgacttcacgttcaactatggttggacctataacaagcttgaccgtggttacttcccgacagatggtagtcgtgtcaacctgaccggtaaagtgaccattcctggaagcgataacgaatactacaaagtgacgttagacacggcgacttatgtgccgatcgatgacgatcacaaatgggttgttctggggcgtacccgctggggttatggtgatggtttaggcggcaaagagatgccgttctacgagaacttctatgccggtggttccagcaccgtgcgtggcttccagtccaataccattggtccgaaagcagtttacttcccgcatcaggccagtaattatgatccggactatgattacgaatgtgcgactcaggacggcgcgaaagacctgtgtaaaagcgatgatgctgtaggcggtaacgccatggcggttgccagcctcgagttcatcaccccgacgccgtttattagcgataagtatgctaacagcgttcgtacttccttcttctgggatatgggtaccgtttgggatacaaactgggattccagccaatattctggatatccggactatagtgatccaagcaatatccgtatgtctgcgggtatcgcattacaatggatgtccccattggggccgttggtgttctcctacgcccagccgttcaaaaagtacgatggagacaaggcagaacagttccagtttaacatcggtaaaacctggtaagtgttctccacaaaggaatgtagtggtagtgtagcgatgactttaggcgatcaatataagatcgccgggccacgcaaagaactgcaccctccggtgcaaatgggatggtaaggagtttattgtgaaaaagtggttattagctgcaggtctcggtttagcactggcaacttctgctcaggcggctgacaaaattgcaatcgtcaacatgggcagcctgttccagcaggtagcgcagaaaaccggtgtttctaacacgctggaaaatgagttcaaaggccgtgccagcgaactgcagcgtatggaaaccgatctgcaggctaaaatgaaaaagctgcagtccatgaaagcgggcagcgatcgcactaagctggaaaaagacgtgatggctcagcgccagacttttgctcagaaagcgcaggcttttgagcaggatcgcgcacgtcgttccaacgaagaacgcggcaaactggttactcgtatccagactgctgtgaaatccgttgccaacagccaggatatcgatctggttgttgatgcaaacgccgttgcttacaacagcagcgatgtaaaagacatcactgccgacgtactgaaacaggttaaataagtaatgcctagtattcgactggctgatttagcgcagcagttggatgcagaactacacggtgatggcgatatcgtcatcaccggcgttgcgtccatgcaatctgcacaaacaggtcacattacgttcatggttaacccaaaataccgtgagcatttaggcttgtgccaggcgtccgcggttgtcatgacccaggacgatcttcctttcgcgaaaagtgccgcactggtagtgaagaatccctacctgacttacgcgcgcatggcgcaaattttagataccacgccgcagcccgcgcagaacattgcacccagtgcggtgatcgacgcgacggcgaagctgggtaacaacgtaagcattggcgctaacgcggtgattgagtccggcgttgaactgggcgataacgtgattatcggtgccggttgcttcgtaggtaaaaacagcaaaatcggtgcaggtagccgtctctgggcgaacgtaaccatttaccatgagatccagatcggtcagaattgcctgatccagtccggaacagtggtaggcgcagacggctttggttatgccaacgatcgtggtaactgggtgaagatcccacagattggtcgcgtaattattggcgatcgcgtggagatcggtgcctgcacaaccatcgatcgcggcgcgctggatgacactattattggcaatggcgtgatcattgataaccagtgccagattgcacataacgtcgtgattggcgacaatacggcggttgccggtggcgtcattatggcgggcagcctgaaaattggtcgttactgcatgatcggcggagccagcgtaatcaacgggcatatggaaatatgcgacaaagtgacggttacgggcatgggtatggtgatgcgtcccatcactgaaccaggcgtctattccagtggcattccgctgcaacccaacaaagtctggcgcaaaaccgctgcactggtgatgaacattgatgacatgagcaagcgtctgaaaagccttgagcgcaaggttaatcaacaagactaacgttccatcttttgttcgccaaactttacggcctgtctcattcttacgattgcggcaggccgtgttattattgtcgtttcttatattttgacaggaagagtatcttgactactaacactcatactctgcagattgaagagattttagaacttctgccgcaccgtttcccgttcttactggtggatcgcgtgctggattttgaagaaggtcgttttctgcgcgcagtaaaaaatgtctctgtcaatgagccattcttccagggccatttccctggaaagccgattttcccgggtgtgctgattctggaagcaatggcacaggcaacaggtattctggcgtttaaaagcgtaggaaaactggaaccgggtgagctgtactacttcgctggtattgacgaagcgcgcttcaagcgcccggtcgtgcctggcgatcaaatgatcatggaagtcactttcgaaaaaacgcgccgcggcctgacccgttttaaaggggttgctctggtcgatggtaaagtagtttgcgaagcaacgatgatgtgtgctcgtagccgggaggcctgatacgtgattgataaatccgcctttgtgcatccaaccgccattgtggaagagggcgcgagtattggcgcgaacgcacacattggtcctttttgtatcgttggaccccatgtcgaaattggtgagggtaccgtactgaaatctcacgttgtcgtgaatggtcatactaaaattggccgcgataatgagatttatcagttcgcctccatcggcgaagttaaccaggatctgaaatatgctggcgaaccgacccgtgtggaaatcggcgatcgtaaccgcattcgcgaaagcgtcaccattcatcgtggcacagtccagggcggtggattgacgaaggtgggcagcgacaacttactgatgatcaacgcgcacattgcgcacgattgtacggtaggtaaccgctgtattctcgccaacaacgcaacgctggcgggtcacgtaagcgttgacgacttcgcgatcatcggcggcatgaccgcagtccatcagttctgcatcattggtgcgcacgtgatggttggcggctgctccggtgtggcgcaggacgtccctccttatgtcattgcgcagggtaaccacgcaacgccgttcggtgtcaatatcgaagggctgaagcgccgcggattcagccgtgaggcgattaccgctatccgcaatgcgtataagctgatttatcgtagcggtaaaacgctcgatgaagtgaaaccggaaattgctgaactggcggaaacatatccggaagtgaaagcctttaccgatttctttgcacgcagtacgcgcggtctgattcgttaatgactgaacagcgtccattaacgattgccctggtcgccggagaaacctccggcgatatcctgggggccggtttaatccgcgctctgaaagaacatgtgcccaacgcccgctttgttggtgttgccgggccacgaatgcaggctgaaggctgcgaagcctggtacgaaatggaagaactggcggtgatgggcattgttgaagtgctcggtcgtctgcgtcgcttactgcatattcgtgccgatctgacaaagcgttttggcgaactgaagccagatgtttttgttggtattgatgcgcctgacttcaatattactcttgaaggtaacctcaaaaagcagggtatcaaaaccattcattacgtcagtccgagtgtctgggcgtggcgacagaaacgtgttttcaaaataggcagagccaccgatctggtgctcgcatttctgcctttcgaaaaagcgttttatgacaaatacaacgtaccgtgccgctttatcggtcataccatggctgatgccatgccattagatccagataaaaatgccgcccgtgatgtgctggggatccctcacgatgcccactgcctggcgttgctaccggggagccgtggtgcagaagttgaaatgcttagtgccgatttcctgaaaacggcccagcttttgcgccagacatatccggatctcgaaatcgtggtgccactggtgaatgccaaacgccgcgagcagtttgaacgcatcaaagctgaagtcgcgccagaccttagtgttcatttgctggatgggatgggccgtgaggcgatggtcgccagcgatgcggcgctactggcgagcggtacggcagccctggagtgtatgctggcgaaatgcccgatggtggtgggatatcgcatgaagccttttaccttctggttggcgaagcggctggtgaaaactgattatgtcagcctgccaaatctgctggcgggcagagagttagtcaaagaattattgcaggaagagtgtgagccgcaaaaactggctgcggcgctgttaccgctgttggcgaacgggaaaaccagccacgcgatgcacgataccttccgtgaactgcatcagcagatccgctgcaatgccgatgagcaggcggcacaagccgttctggagttagcacaatgatcgaatttgtttatccgcacacgcagctggttgcgggtgtggatgaagtcggacgcgggccgttagttggcgcggtcgtcaccgctgcggtgatccttgacccggcgcgcccgattgccgggctgaatgattccaaaaagctgagcgaaaaacgccgtctggcgctctatgaagagatcaaagagaaagcgttgagctggagtctgggccgcgcggaaccccacgaaatcgacgagctgaacattcttcatgcgaccatgctggcgatgcagcgtgccgtcgctgggctgcatattgcgccggaatatgtgttgattgatggtaaccgctgcccgaaattaccgatgcctgcgatggctgtggtgaaaggcgatagccgcgtaccggaaatcagtgccgcgtctatcctggcgaaagtgacgcgtgacgccgaaatggcggcgctggatattgttttcccgcaatatggttttgcccaacacaaagggtacccaaccgcttttcatctggaaaaactggctgaacacggcgcgaccgaacaccatcggcgcagctttgggcctgtcaaacgcgcactgggacttgcgtcctgattcttgtgtcgagattaagtaaaccggaatctgaagatgtctgaaccacgtttcgtacacctgcgggtgcacagcgactacagcatgatcgatggcctggccaaaaccgcaccgttggtaaaaaaggcggcggcgttgggtatgccagcactggcgatcaccgatttcaccaacctttgtggtctggtgaagttctacggagcgggacatggcgcagggattaagcctatcgtcggggcagattttaacgtccagtgcgacctgctgggtgatgagttaacccacctgacggtactggcggcgaacaataccggctatcagaatctgacgttgctgatcagtaaagcgtatcagcgcgggtacggtgccgccgggccgatcatcgatcgcgactggcttatcgaattaaacgaagggttgatccttctttccggcggacgcatgggcgacgtcggacgcagtcttttgcgtggtaacagcgcgctggtagatgagtgtgtcgcgttttatgaagaacacttcccggatcgctattttctcgagctgatccgcaccggcaggccggatgaagaaagctatctgcacgcggcggtggaactggcggaagcgcgcggtttgcccgtcgtggcgaccaacgacgtgcgctttatcgacagcagcgactttgacgcacacgaaatccgcgtcgcgatccacgacggctttaccctcgacgatcctaaacgcccgcgtaactatagcccgcagcaatatatgcgtagcgaagaggagatgtgtgagctgtttgccgacatccccgaagcccttgccaacaccgttgagatcgccaaacgctgtaacgtaaccgtgcgtcttggtgaatacttcctgccgcagttcccgaccggggacatgagcaccgaagattatctggtcaagcgtgcaaaagagggcctggaagagcgtctggcctttttattccctgatgaggaagaacgtcttaagcgccgcccggaatatgacgaacgtctggagactgaacttcaggttatcaaccagatgggcttcccgggctacttcctcatcgttatggaatttatccagtggagcaaagataacggcgtaccggtagggccaggccgtggctccggtgcgggtagtctggtggcctacgcgctgaaaatcaccgacctcgatccgctggaatttgacctgctgttcgaacgtttccttaacccggaacgtgtctccatgcctgacttcgacgttgacttctgtatggagaaacgcgatcaggttatcgagcacgtagcggacatgtacggtcgtgatgcggtaagccagatcatcaccttcggtacaatggcggcgaaagcggtgatccgcgacgtaggccgcgtgctggggcatccgtacggctttgtcgatcgtatcagcaaactgatcccgcccgatccggggatgacgctggcgaaagcgtttgaagccgagccgcagctgccggaaatctacgaagcggatgaagaagttaaggcgctgatcgacatggcgcgcaaactggaaggggtcacccgtaacgccggtaagcacgccggtggggtggttatcgcgccgaccaaaattaccgattttgcgccgctttactgcgatgaagagggcaaacatccggtcacccagtttgataaaagcgacgttgaatacgccggactggtgaagttcgacttccttggtttgcgtacgctcaccatcatcaactgggcgctggagatgatcaacaagcggcgggcgaagaatggcgagccgccgctggatatcgctgcgatcccgctggatgataagaaaagcttcgacatgctgcaacgcagcgaaaccacggcggtattccagcttgaaagccgcggcatgaaggacctgatcaagcgtctacaacctgactgcttcgaagatatgatcgccctagtggcactgttccgccccggtccgttgcaaagtgggatggtggataactttatcgaccgtaaacatggtcgtgaagagatctcctatccggacgtacagtggcagcatgaaagcctgaaaccggtactggagccaacctacggcattatcctgtatcaggaacaggtcatgcagattgcgcaggtgctttctggttataccctcggtggcgcggatatgctgcgtcgtgcgatgggtaagaaaaagccggaagagatggctaagcaacgttctgtatttgctgaaggtgcagaaaagaacggaatcaacgctgaactggcgatgaaaatcttcgacctggtggagaaattcgctggttacggatttaacaaaagccactctgcggcctatgctttggtgagttatcaagcgttatggctgaaagcgcactatcctgcggagtttatggcggcggtaatgaccgccgatatggacaacaccgagaaggtggtgggtctggtggatgagtgctggcggatggggctgaaaatcctgccaccagatataaactccggtctttaccatttccacgtcaacgacgacggcgaaatcgtgtatggtattggcgcgatcaaaggggtcggtgaaggtccgattgaggccatcatcgaagcccgtaataaaggcggctacttccgcgaactgtttgatctctgcgcccgtaccgacaccaaaaagttgaaccgtcgcgtgctggaaaaactgatcatgtccggggcgtttgaccgtcttgggccacatcgcgcagcgctgatgaacagcctgggcgatgcgttaaaagcggcagatcaacacgcgaaagcggaagctatcggtcaggccgatatgttcggcgtgctggccgaagagccggaacaaattgaacaatcctacgccagctgccaaccgtggccggagcaggtggtattagatggggaacgtgaaacgttaggcctgtacctgaccggacaccctatcaaccagtatttaaaagagattgagcgttatgtcggaggcgtaaggctgaaagacatgcacccgacagaacgtggtaaagtcatcacggctgcggggctcgttgttgccgcgcgggttatggtcaccaagcgcggcaatcgtatcggtatctgcacgctggatgaccgttccgggcggctggaagtgatgttgtttactgacgccctggataaataccagcaattgctggaaaaagaccgcatacttatcgtcagcggacaggtcagctttgatgacttcagcggtgggcttaaaatgaccgctcgcgaagtgatggatattgacgaagcccgggaaaaatatgctcgcgggcttgctatcagcctgacggacaggcaaattgatgaccagcttttaaaccgactccgtcagtctctggaaccccaccgctctgggacaattccagtacatctctactatcagagggcggatgcacgcgcgcggttgcgttttggcgcgacgtggcgtgtctctccgagcgatcgtttattaaacgatctccgtggcctcattggtagcgagcaggtggaactggagtttgactaatacaggaatactatgagtctgaatttccttgattttgaacagccgattgcagagctggaagcgaaaatcgattctctgactgcggttagccgtcaggatgagaaactggatattaacatcgatgaagaagtgcatcgtctgcgtgaaaaaagcgtagaactgacacgtaaaatcttcgccgatctcggtgcatggcagattgcgcaactggcacgccatccacagcgtccttataccctggattacgttcgcctggcatttgatgaatttgacgaactggctggcgaccgcgcgtatgcagacgataaagctatcgtcggtggtatcgcccgtctcgatggtcgtccggtgatgatcattggtcatcaaaaaggtcgtgaaaccaaagaaaaaattcgccgtaactttggtatgccagcgccagaaggttaccgcaaagcactgcgtctgatgcaaatggctgaacgctttaagatgcctatcatcacctttatcgacaccccgggggcttatcctggcgtgggcgcagaagagcgtggtcagtctgaagccattgcacgcaacctgcgtgaaatgtctcgcctcggcgtaccggtagtttgtacggttatcggtgaaggtggttctggcggtgcgctggcgattggcgtgggcgataaagtgaatatgctgcaatacagcacctattccgttatcagcccggaaggttgtgcgtccattctgtggaagagcgccgacaaagcgccgctggcggctgaagcgatgggtatcattgctccgcgtctgaaagaactgaaactgatcgactccatcatcccggaaccactgggtggtgctcaccgtaacccggaagcgatggcggcaagcttgaaagcgcaactgctggcggatctggccgatctcgacgtgttaagcactgaagatttaaaaaatcgtcgttatcagcgcctgatgagctacggttacgcgtaattcgcaaaagttctgaaaaagggtcacttcggtggcccttttttatcgccacggtttgagcaggctatgattaaggaaggattttccaggaggaacacatgaacatcattgccattatgggaccgcatggcgtcttttataaagatgagcccatcaaagaactggagagcgcgctggtggcgcaaggctttcagattatctggccacaaaacagcgttgatttgctgaaatttatcgagcataaccctcgaatttgcggcgtgatttttgactgggatgagtacagtctcgatttatgtagcgatatcaatcagcttaatgaatatctcccgctttatgccttcatcaacacccacagcacgatggatgtcagcgtgcaggatatgcggatggcgctctggttttttgaatatgcgctggggcaggcggaagatatcgccattcgtatgcgtcagtacaccgacgaatatcttgataacattacaccgccgttcacgaaagccttgtttacctacgtcaaagagcggaagtacaccttttgtacgccggggcatatgggcggcaccgcatatcaaaaaagcccggttggctgtctgttttatgatttttcggcgggaatactcttaaggctgatgtctctattagcgtcaccgagcttggtagcttgctcgaccacaccgggccacacctggaagcggaagagtacatcgcgcggacttttggcgcggaacagagttatatcgttaccaacggaacaagcacgagcaacaaaattgtgggtatgtacgccgcgccatccggcagtacgctgttgatcgaccgcaattgtcataaaagcctggcgcatctgttgatgatgaacgatgtagtgccagtctggctgaaaccgacgcgtaatgcgttggggattcttggtgggatcccgcgccgtgaatttactcgcgacagcatcgaagagaaagtcgctgctaccacgcaagcacaatggccggttcatgcggtgatcaccaactccacctatgatggcttgctctacaacaccgactggatcaaacagacgctggatgtcccgagcattcacttcgattctgcctgggtgccgtacacccattttcatccgatctaccagggtaaaagtggtatgagcggcgagcgtgttgcgggaaaagtgatcttcgaaacgcaaagcacccacaaaatgctggcggcgttaagccaggctagcctgatccacattaaaggcgagtatgacgaagaggcctttaacgaagcctttatgatgcataccaccaccagccccagttatcccattgttgctagcgttgagacggcggcggcgatgctgcgtggtaatccgggcaaacggctgattaaccgtagtgtagaacgagctctgcattttcgcaaagaggtccagcggctgcgggaagagtctgacggttggtttttcgatatctggcaaccgccgcaggtggatgaagccgaatgctggcccgttgcgcctggcgaacagtggcacggctttaacgatgcggatgccgatcatatgtttctcgatccggttaaagtcactattttgacaccggggatggacgagcagggcaatatgagcgaggaggggatcccggcggcgctggtagcaaaattcctcgacgaacgtgggatcgtagtagagaaaaccggcccttataacctgctgtttctctttagtattggcatcgataaaaccaaagcaatgggattattgcgtgggttgacggaattcaaacgctcttacgatctcaacctgcggatcaaaaatatgctacccgatctctatgcagaagatcccgatttctaccgcaatatgcgtattcaggatctggcacaagggatccataagctgattcgtaaacacgatcttcccggtttgatgttgcgggcattcgatactttgccggagatgatcatgacgccacatcaggcatggcaacgacaaattaaaggcgaagtagaaaccattgcgctggaacaactggtcggtagagtaagcgcaaatatgatcctgccttatccaccgggcgtaccgctgttgatgcctggagaaatgctgaccaaagagagccgcacagtactcgattttctactgatgctttgttccgtcgggcaacattaccccggttttgaaacggatattcacggcgcgaaacaggacgaagacggcgtttaccgcgtacgagtcctaaaaatggcgggataacttgccagagcggcttccgggcgagtaacgtgctgttaacaaataaaggagacgttatgctgggtttaaaacaggttcaccatattgcgattattgcgacggattatgcggtgagcaaagctttctactgcgatattcttggtttcacgctgcaaagcgaagtctatcgcgaagcgcgcgacagttggaaaggggatttggcgcttaatgggcaatatgtgattgagcttttcagttttccgttcccgccggaacgacccagccgaccggaagcttgcggtctgcgtcatctggcttttagcgttgatgacatcgatgcggcagtggcgcaccttgaaagccataacgtgaagtgtgaaaccatccgtgtcgatccatacacgcaaaaacgcttcaccttctttaacgatccggacgggctgccgttggaactgtatgagcagtaaggcttgtcatcgccgcatttgcccggtaacgtgccgggcattgctactgtaaaatcgcaccatcatgacactcacgctcaatagacaacttctcaccagtcgccagattctggtggcctttagcggcgggcttgactccaccgttctgctgcatcagttggtgcagtggcggacggaaaatccgggtgtcgctctgcgcgctattcatgtgcatcacggtttaagtgccaatgccgatgcctgggttacgcattgcgaaaacgtctgccaacagtggcaggtgccgctggtggtcgaacgcgtacaacttgcgcaagaaggactgggcattgaggcccaggcgcggcaggcacgttatcaggcatttgcccgcaccttgttgcccggtgaagtgctggtcaccgcgcaacatctcgacgatcaatgtgaaacctttctgctggcgctaaaacgcggcagtggccctgccgggcttagcgctatggcggaagtcagcgagtttgccggaacgcggcttattcgcccgttgctcgcccgcacgcggggggaactggtgcagtgggcgcgtcagtatgatttacgctggattgaagacgaaagtaatcaggacgacagttacgatcgtaactttctgcgcctgcgcgtagtgccgttattgcagcagcgttggccgcattttgccgaagcaacggcccgcagcgccgcactttgtgctgaacaagagagcctgctggatgaactgctggcagatgatttagcacactgtcaaagcccgcaggggacgctgcagattgtgccaatgctggcgatgagtgatgcccgccgcgcggcgattatccgccgctggctggcagggcagaatgcaccgatgccttcccgcgacgcgttggtgaggatctggcaggaagtggcgctggcgcgggaagatgccagtccctgtttacgtttgggcgcgtttgaaatccgacgctatcagagccaactgtggtggattaaatccgtcaccgggcaaagcgaaaacattgtgccgtggcagacgtggcttcaaccgctggaattaccggcggggctgggaagtgtacagcttaatgcgggaggcgatattcgccctccgcgtgcagacgaagcggtcagcgtgcgtttcaaagcgccaggattgctgcatattgtcgggcgtaacggcggacgtaagctaaagaaaatctggcaagagctgggcgtgccgccgtggctacgtgacaccacgccactgctgttttatggcgaaacgctgattgcggcggcaggggtatttgtgacgcaagaaggtgtggctgaaggtgagaatggcgtaagttttgtctggcagaaaacgcttagttaagtgaaagccggataagacgcatcaaacgtcgcatccggcgaaagtcaatcaggattcgcttaccaccaccgtaccgatttccgggtggctaaagctggtaattttatccagacgcagctcgcgggtttcgccagcggcctcgacgaccaggtactccacatttttgcgggagactaaatcactggcttttgcctgcaatttttcgccatctttcagctcaagtgtcagcattaaatgatgctggcaggcgagctcaagattatcgtaatcatcacaattgattggttgatacgtatcattcattgacataatcgctcaccagtaagtttgccgcagcgtatgctgctttttccctgacagcctcagaaagggcgtcgtcggcagccatttcattcagcactttcaaaacgcagcccagcgcgtccggaacgtatcctaagtctccgctggcgatttccgcgtaccgcttgcgtattaactcacaatatttttccacatgccctcctgtcagcactctgacttaaccgtggatgcaagtctaagcctacgaagataaactctgtttcgcaaggtgactataccacactcatttctgcaatatcagcgccgcaactgcacgtattccgttacaatggcctcctgattcgaaaggagttttcttatggcgcttaaagcgacaatttataaagcgacggttaatgtggccgatctcgaccgcaaccagtttctcgatgcctctctgacgctggcgcgccatcctagtgaaacccaggagcgtatgatgctgcgcttgctggcgtggctgaaatatgctgatgaacgtctgcaatttacccgtggtttgtgtgccgatgatgagccggaagcgtggctgcgtaacgatcacctgggcattgatttgtggattgagctggggctgccggatgagcggcggattaagaaagcctgcacccaggccgcagaagtggcgctgtttacctataatagtcgggcggcgcaaatctggtggcagcaaaatcagagcaaatgtgtgcagtttgccaatctttccgtctggtatctggacgatgaacaactggcgaaagtaagcgcctttgccgatcgtaccatgacgctgcaggcaacgattcaggatggcgtgatctggttaagcgatgataagaataatctggaagtgaacttaaccgcctggcaacaacctagttgaactaaaccgcctggcaacaaccttcatgattgtgatttcccgacatgttgctattcccgatggtgagcttgagatcaccgccattcgtgcgcagggcgcgggcgggcagcatgttaataagaccagtacggctattcatctgcgttttgacattcgggcgtccagcctgccagagtattacaaagagcgtctgctcgccgccagccatcatttgatcagcagtgatggcgtgattgtcattaaggcacaggaataccgcagtcaggaactgaaccgcgaagcagctctggcccggctggtggctatgattaaagaattaacaacagaaaaaaaagcccgacgacccacgcggcccacccgtgcaagcaaagagcgcaggctggcaagcaaagcacaaaaaagtagcgtgaaggcgatgcgcggcaaagtgcgcagcggtcgggaataaaaagaaggaatggatggtgaaaaaagcgatagtgacagcgatggctgtaatcagcctctttactctgatgggatgtaataatcgggccgaagtcgatacgctttctccggcgcaggctgccgaactgaaaccgatgccgcaaagttggcgcggcgtgctgccgtgtgccgattgcgaaggaatcgaaacctctctgttcctcgaaaaagacggaacatgggtgatgaatgagcgttatctcggtgctcgtgaagaaccttcctccttcgcttcctacggtacatgggcgcgaaccgctgacaagctggtattaaccgacagcaaaggtgaaaagagttattatcgggcgaaaggcgatgcgctggagatgctcgatcgtgaaggcaatccgattgaaagccagttcaactatacgctggaagcggcacaatccagtttacctatgacgccgatgaccctgcggggcatgtatttttatatggctgatgcggcgaccttcactgattgcgcgaccggaaaacgtttcatggtagcgaataacgcagagctggagcgtagctacctggctgcgcgcggtcacagtgaaaaaccggtgttactgagtgtagaaggtcactttacgcttgagggtaatccggataccggtgcgccgactaaagtattggcacccgatacggcagggaaattttaccccaaccaggattgcagtagtttggggcagtaacccgtcttgagacagaaacaaacgcaaaacaggccagaaggatatatttcaacattttgaatttgcacgttttttgtaggccggataaggcgtttacgccgcatccggcaatggtgctcaacgcctgatgcgacgctggcgcgtcttatcatgcctacgacccccctcataccttaaggcggataaggcatttactttatcaccgggtcaaaccaacaaagcgacccgccttgatataaatcccaggcttcaggtgcccaacatactgtaactgcgtttctggcttaaacgcagagacatcaccaatacgcatatgcatcagatcggcagggctaatccagccgctttgcgccagtgtaagtggatgcccggctttggcaaaggcatccgtgacaaattcgctacaaaaccagctctttttgtctccttcgcccacactgcttaactgcgctttcgccaggccgctgacgcactgttggcgaaaatcctcggagaacggattcagactgcacatctggcgagtcaccataaagggaataaattcgacaatgccgcgatagttataaccgctatctttgattttattggcaaacgcggtgatatctgtggcttgttgcggggtaagatccgggactcgtaagacgaaaagcttatcactatgcttcatcgcttttttaagggaaacgatctggacgccagcgcctgtcgcttctgcaacgttattatcacccagaaagattgcaacgtgactcacagaggaagtgctgaagacgcggattccaaaactggttaccccaaggctactggagaacagcaaatcgccgggtttgagatcaggtgccgttatttcttttatactttgttcggtgaaagagctttgatgctggaatttgacagcccatgtttttgcctcggcatctactgctgtggcacttgggtctggctggctgatatcaacggtacaagcgctaagtaaaagaaagctggggagaaacaggcggcagtacgcctttggtttatccattttatacaatccatgtaaaaaaagggccctgaaattcaggaccctttctggcatcagcctttaatctgtttcaccagatattcgacgatgtcaccagtcttaattaactgtttctcgccgttgcgacgatatttatattcgatatcgtcgttgtcgaggttacggtcgcccagcacaatagtgtgcggaataccgatcagttccatatcagcaaacatcacgcccggacgctctttgcggtcatccagcagcacttcgataccttgtgcacgcagttcgctgtacagtttctcagcaagctcttgtacgcggaaggatttgtgcatgttcatcggcagaatcgccacctggaacggcgcgatagcgtcaggccatacgatgcctcgttcgtcgtagttctgctcaatcgccgcagctaccacacgcgttaccccgataccgtagcaacccatcgtcaggatttggttgcggccatcttcaccctgtacggaggctttcagtgcttcggagtacttggtacccagctggaagatgtgaccaacttcgataccacgtttgatcagcagcctaccctggccatccgggcttggatcgccagccaccacgttacggatatctgcaacttccggggtagcgacatcgcgatcccagttgatgccgaagtagtgtttaccatcgatgttagcaccagcagcgaaatcactcatcgccgcaacggtacggtcaatcaccaccggaatcggcatgtttaccggacccagactacccggaccggctttaaccacggcacgaatttcttcttcggtcgcgaaagtcagcgggcttgcaacctgcggcagtttttctgctttaacttcgttcagctcgtgatcaccgcgcaccagcagcgcaacctgcgggaagctgctgccttcaaccgctttaaccagcagagtcttaaccgttttctcaatcggcagattgaactgttcaaccagttccgcgatggttttcgcgttcggcgtatcaaccagcgtcatttcctgggtagcagcagcgcgcggttctttcggcgcgatagcttctgccagttcaatgttcgctgcatagtcagaggtgtcggagaagaccacatcgtcttcaccgctctgcgccagcacctggaattcgtgagaggcgctgccgccgatagaaccggtgtcggcttgtacggcgcggaaatccagccccatgcggctgaagattttgctgtaggccgcatacattgcatcgtaggtttcctgcagggattcctgagaagtatggaaagagtaagcatctttcatcaggaattcgcgggaacgcatgacgccgaaacgcggacgcacttcgtcgcggaacttggtctggatctgatagaagttcagcggcagctgtttgtaagagctaagctcgttacgaatcaggtcagtgataacttcttcatgagttgggccgagtacgaacggacgctcgccacggtcaacaaaacgcagcagttccggaccgtactgttcccaacgaccactctcttgccacaaatcggctggctgaaccaccggcatgctcacctcgatcgcaccggcgttgttcatctcttcacgcacgatgttttcgacttttttcagaacgcgcacgccggtcggcagccaggtatataacccggaggccagcttgcggatcatcccggcgcgcagcatcagctgatggctgatcacctcggcgtcggcaggtgtctccttgagagtggagagcaggtattggctagtacgcatgttgttacggttccagttggaaggtagaacaggctcaaggcgagcctgggacaaaaaaagtgatttagtttaccagtgcaaaagaaatgtcaaaagagaagggcgtgaatttaacgcggttccagcgcaaagacttcaaaacctgcgtcggtgacgcgccagcgaacgttaaaatcatgtagccagacggcataggttttgcccgtttcctcacctttacgataggccgggcgcgggtcctgcgccagtacttcgcggataaacagcgttaactgcggataacgcttctccagcgtcaaaagctgcttttcgacctctgcggtaaaactcaccgccatctctgcagctggcgcactttgcgcatagctggcactggcatcgggaaggctttcggcaaaggggagatacggtttgatatccactaccggcgtaccatcgaccagatccagactgccgagcttcagaatcacgctgtctttatggcaaacaacctctttcagctctaccaggctcatgccaattgggttagggcggaaagtagagcgtgttgcgaaaacccccattctggcgttaccgccgaggcgcggtggacgcacagtcggacgccagccgccttccatcgtttgatgaaagacgaaaaggatccataaatggctgaacgcttccaggccgcgaacggcgtcggcctggttgtagggagcaatgagatgcagttcgccgttggcgctttttaccagacctggctggcgcggaacggcgaacttttctttataggggctgcgaataacgcctatttgctcgaactggaaactgctcatttcgccgtaatgttaagcgcagaaccgatacatacagcctgacgatagcagcctggcgtaccgctggtgacttcgcagctatgcagtaatacagcattggctttcattttagaggcgttgatttgcatccgcttacgtgcggttggaatgctcggcggagagtcctgattagaggcctggcaagagtcgccactgacttcaccgagatcgcggaacggtttgccgactaattcttctgcattggtataaattcggaccggcgtggcgcgcggcgctttcggttttgcaggctccgctttcggctggggtgcagtgctttgaacgggttcgacaggggatctgcttaacatggaacagccgcttagcatgagtgctactaaacagatcggtaaagcacgcatagtatttcctcaatgtatgatcaaaacgtcaatattgaatcaggagcttgtaaaaatgacaagacgggcaagcgcccgtcctgaatgatattacaaattgtggaaacagcctaaaaattaccagcctttaacagctccgccgttaaacactttgtttgctgcttcgtaaacttcgtcagactgataagcctggacgaatttcttcacgttctcggcgtctttgttatcttcacgcgtcacgatcaggtttacgtacggggactctttatcttcaacaaagataccgtctttcgccggagtcaggccaatctggctggcataggtggtattgataactgccagagcgatttgcgcgtcgtccagagaacgcggcagttgcggtgcttccagttcaacaattttcagatttttggggttctcaacaacatcaagaacggtcggcagcaggccaacgccatctttcagtttgatcaagcccactttttgcagcagcagcagactacgaccaaggttagttgggtcgtttggcacggcaacctggctaccatcctgcagttcatccagacttttgattttcttggagtaaccagcaatcggataaacaaaagtgttgcctactgcgaccagtttgtagccacgatctttcagttgctgatcaaggtacggtttatgctggaaggcgttggcgtcgatatcgcctttgctcaatgcttcgtttggcagaacatagtcgttgaaggttaccagctcaacgtccaggccatatttgtctttcgcaactttctgcgcgacttctgcaacctgctgttcggcaccaacaatcacgccgactttaatgtggtttggatctttttcatcctgaccgcagcctaccagtgccagacttccgatcagggctcccactgccgcaaaggttttgaatttgaacgccataccttattccttcttcaattatttatgttgtgttgaacgttacttgcgagtgacagcccggacgatgcggtcgcctgcgaactgaattaaataaaccagaatgaccagcaataccagtaccgtattcatcaccgtcgcgttatagccgatgtagccatactgatagccaatctgacctaaaccaccggcaccgactgcaccacccatcgcggaataaccgaccagggtaatcagggtgatagttgccgcattcaccagacccggcagcgcttccggtaacagcaccttacggacgatctgcatcggcgtggcacccattgcgcgggaagcttcaattaacccggttgggatctccagcagagcgttctcgaccatacgggcaataaacggtgctgcaccaacggttaacggaacaatcgctgcctgcaaaccaatgcttgtaccgacaataacgcgggtaaacggaatcatccatacaagcaagataatgaacgggatggaacggaaaatgttcacaatcgcagaaacggtacgatacagcttcgcgttagcaataatttgccccggacgcgtgacataaagcagaacgccaaccggcagaccaatcacaaagccaaaaaaaccggatacgaaggtcattgccagcgtttcccatacgccacgaaccagcagccacatcatcggctcagacataacccagtacctctacttttacatggtgttcctgcagccaggcaatggcggcttgcgtatcttgttgtgtgccgtgcatttcagtcagcatgatgccgaacttaacgccaccggcgtaatccatctgcgcgctaataatgttgttgttgacgttgaaacgacgcgcggtttcagaaagcagtggggcatcgacgctttgaccggtaaactccagacgcagcatcggcacgcagtcagtaaatggctccgcttgcagacgttcctggtaatcttccgggatatccagatgcagggtgctctgaataaacttctgcgccagcggcgttttcggatggctgaacacttcacttaccgtgtcctgctcgatcagttctccattgctgatgaccgccacgcaatcacaaatgcgcttcacaacgtccatttcgtgggtgatcaacagaatcgtcaaccccagacggcggttgatgtctttcagcagttcgagaatagaacgtgtcgttgccgggtccagcgcgctggtggcttcatcacacagcaatactttgggattgctggctaacgcacgggcaattgccacacgttgtttctgcccaccggaaagattgctcgggtagctatcatgcttatcgccaagaccaaccaaactcagcaattccgtcacgcgacgtttgacctcgtctttcggtgtgttgtccagctccagcggcagagccacgttgccaaaaacagtacggctagagagcaggttaaaatgctggaaaatcataccaatctggcggcgagctttggtcaactcggattcactcagcgtggtcagttcctggccatcgaccagcacgctaccctcggttgggcgctccagcaggtttacacaacgtataagcgtactcttacccgcgccactggcaccgataacgccataaatttgtccagctggcacatgcaggctgacgttgttcaacgcctggatggtgcgggtgccctggtggaacactttggtgatattgctaagttttatcattgattatttattatcgtcattaagttagtcgtggcatctcgaatgcctgaaacgggcaacgccgtcaatgaaatggatgttaaggcatccagacgtctaaatcaatcaggtttatgcgaagagcactttcttgcaggtcgaaacatgcgatactagcgtcacatgccttattaaggagctataaaaggtggcgaagagcgtacccgcaatttttcttgaccgtgatggcaccattaatgtcgatcacggctatgtccatgagatcgacaactttgaatttatcgacggtgttattgacgccatgcgcgagctaaaaaaaatgggctttgcgctggtggtagtaaccaaccagtctggcattgctcgcggtaaatttaccgaagcacagtttgaaacgctgaccgagtggatggactggagcctggcggaccgagatgtcgatctggatggtatctattattgcccgcatcatccgcagggtagtgttgaagagtttcgccaggtctgcgattgccgcaaaccacatccggggatgcttttgagtgcacgcgattatttgcatattgatatggccgcttcttatatggtgggcgataaattagaagatatgcaggcagcggttgcggcgaacgtgggaacaaaagtgctggtgcgtacgggtaaacctattacgcctgaagcagaaaacgcggcggattgggtgttaaatagcctggcagacctgccgcaagcgataaaaaagcagcaaaaaccggcacaatgattaaaagatgagcggttgaaataaaaatgcatttttccgcttgtcttcctgagccgactccctataatgcgcctccatcgacacggcggatgtgaatcacttcacacaaacagccggttcggttgaagagaaaaatcctgaaattcagggttgactctgaaagaggaaagcgtaatatacgccacctcgcgacagtgagctgaaagccgcgtcgcaactgctctttaacaatttatcagacaatctgtgtgggcactcgaagatacggattcttaacgtcgcaagacgaaaaatgaataccaagtctcaagagtgaacacgtaattcattacaaagtttaattctttgagcatcaaacttttaaattgaagagtttgatcatggctcagattgaacgctggcggcaggcctaacacatgcaagtcgaacggtaacaggaagaagcttgcttctttgctgacgagtggcggacgggtgagtaatgtctgggaaactgcctgatggagggggataactactggaaacggtagctaataccgcataacgtcgcaagaccaaagagggggaccttcgggcctcttgccatcggatgtgcccagatgggattagctagtaggtggggtaacggctcacctaggcgacgatccctagctggtctgagaggatgaccagccacactggaactgagacacggtccagactcctacgggaggcagcagtggggaatattgcacaatgggcgcaagcctgatgcagccatgccgcgtgtatgaagaaggccttcgggttgtaaagtactttcagcggggaggaagggagtaaagttaatacctttgctcattgacgttacccgcagaagaagcaccggctaactccgtgccagcagccgcggtaatacggagggtgcaagcgttaatcggaattactgggcgtaaagcgcacgcaggcggtttgttaagtcagatgtgaaatccccgggctcaacctgggaactgcatctgatactggcaagcttgagtctcgtagaggggggtagaattccaggtgtagcggtgaaatgcgtagagatctggaggaataccggtggcgaaggcggccccctggacgaagactgacgctcaggtgcgaaagcgtggggagcaaacaggattagataccctggtagtccacgccgtaaacgatgtcgacttggaggttgtgcccttgaggcgtggcttccggagctaacgcgttaagtcgaccgcctggggagtacggccgcaaggttaaaactcaaatgaattgacgggggcccgcacaagcggtggagcatgtggtttaattcgatgcaacgcgaagaaccttacctggtcttgacatccacagaactttccagagatggattggtgccttcgggaactgtgagacaggtgctgcatggctgtcgtcagctcgtgttgtgaaatgttgggttaagtcccgcaacgagcgcaacccttatcttttgttgccagcggtccggccgggaactcaaaggagactgccagtgataaactggaggaaggtggggatgacgtcaagtcatcatggcccttacgaccagggctacacacgtgctacaatggcgcatacaaagagaagcgacctcgcgagagcaagcggacctcataaagtgcgtcgtagtccggattggagtctgcaactcgactccatgaagtcggaatcgctagtaatcgtggatcagaatgccacggtgaatacgttcccgggccttgtacacaccgcccgtcacaccatgggagtgggttgcaaaagaagtaggtagcttaaccttcgggagggcgcttaccactttgtgattcatgactggggtgaagtcgtaacaaggtaaccgtaggggaacctgcggttggatcacctccttaccttaaagaagcgtactttgcagtgctcacacagattgtctgatgaaaatgagcagtaaaacctctacaggcttgtagctcaggtggttagagcgcacccctgataagggtgaggtcggtggttcaagtccactcaggcctaccaaatttgcacggcaaatttgaagaggttttaactacatgttatggggctatagctcagctgggagagcgcctgctttgcacgcaggaggtctgcggttcgatcccgcatagctccaccatctctgtagtggttaaataaaaaatacttcagagtgtacctgcaaaggttcactgcgaagttttgctctttaaaaatctggatcaagctgaaaattgaaacactgaacaatgaaagttgttcgtgagtctctcaaattttcgcaacacgatgatggatcgcaagaaacatcttcgggttgtgaggttaagcgactaagcgtacacggtggatgccctggcagtcagaggcgatgaaggacgtgctaatctgcgataagcgtcggtaaggtgatatgaaccgttataaccggcgatttccgaatggggaaacccagtgtgtttcgacacactatcattaactgaatccataggttaatgaggcgaaccgggggaactgaaacatctaagtaccccgaggaaaagaaatcaaccgagattcccccagtagcggcgagcgaacggggaggagcccagagcctgaatcagtgtgtgtgttagtggaagcgtctggaaaggcgcgcgatacagggtgacagccccgtacacaaaaatgcacatgctgtgagctcgatgagtagggcgggacacgtggtatcctgtctgaatatggggggggaccatcctccaaggctaaatactcctgactgaccgatagtgaaccagtaccgtgagggaaaggcgaaaagaaccccggcgaggggagtgaaaaagaacctgaaaccgtgtacgtacaagcagtgggagcatgcttaggcgtgtgactgcgtaccttttgtataatgggtcagcgacttatattctgtagcaaggttaaccgaataggggagccgaagggaaaccgagtcttaactgggcgttaagttgcagggtatagacccgaaacccggtgatctagccatgggcaggttgaaggttgggtaacactaactggaggaccgaaccgactaatgttgaaaaattagcggatgacttgtggctgggggtgaaaggccaatcaaaccgggagatagctggttctccccgaaagctatttaggtagcgcctcgtgaactcatctccgggggtagagcactgtttcggcaagggggtcatcccgacttaccaacccgatgcaaactgcgaataccggagaatgttatcacgggagacacacggcgggtgctaacgtccgtcgtgaagagggaaacaacccagaccgccagctaaggtcccaaagtcatggttaagtgggaaacgatgtgggaaggcccagacagccaggatgttggcttagaagcagccatcatttaaagaaagcgtaatagctcactggtcgagtcggcctgcgcggaagatgtaacggggctaaaccatgcaccgaagctgcggcagcgacgcttatgcgttgttgggtaggggagcgttctgtaagcctgtgaaggtgtactgtgaggtatgctggaggtatcagaagtgcgaatgctgacataagtaacgataaagcgggtgaaaagcccgctcgccggaagaccaagggttcctgtccaacgttaatcggggcagggtgagtcgacccctaaggcgaggccgaaaggcgtagtcgatgggaaacaggttaatattcctgtacttggtgttactgcgaaggggggacggagaaggctatgttggccgggcgacggttgtcccggtttaagcgtgtaggctggttttccaggcaaatccggaaaatcaaggctgaggcgtgatgacgaggcactacggtgctgaagcaacaaatgccctgcttccaggaaaagcctctaagcatcaggtaacatcaaatcgtaccccaaaccgacacaggtggtcaggtagagaataccaaggcgcttgagagaactcgggtgaaggaactaggcaaaatggtgccgtaacttcgggagaaggcacgctgatatgtaggtgaagcgacttgctcgtggagctgaaatcagtcgaagataccagctggctgcaactgtttattaaaaacacagcactgtgcaaacacgaaagtggacgtatacggtgtgacgcctgcccggtgccggaaggttaattgatggggttagcgcaagcgaagctcttgatcgaagccccggtaaacggcggccgtaactataacggtcctaaggtagcgaaattccttgtcgggtaagttccgacctgcacgaatggcgtaatgatggccaggctgtctccacccgagactcagtgaaattgaactcgctgtgaagatgcagtgtacccgcggcaagacggaaagaccccgtgaacctttactatagcttgacactgaacattgagccttgatgtgtaggataggtgggaggctttgaagtgtggacgccagtctgcatggagccgaccttgaaataccaccctttaatgtttgatgttctaacgttgacccgtaatccgggttgcggacagtgtctggtgggtagtttgactggggcggtctcctcctaaagagtaacggaggagcacgaaggttggctaatcctggtcggacatcaggaggttagtgcaatggcataagccagcttgactgcgagcgtgacggcgcgagcaggtgcgaaagcaggtcatagtgatccggtggttctgaatggaagggccatcgctcaacggataaaaggtactccggggataacaggctgataccgcccaagagttcatatcgacggcggtgtttggcacctcgatgtcggctcatcacatcctggggctgaagtaggtcccaagggtatggctgttcgccatttaaagtggtacgcgagctgggtttagaacgtcgtgagacagttcggtccctatctgccgtgggcgctggagaactgaggggggctgctcctagtacgagaggaccggagtggacgcatcactggtgttcgggttgtcatgccaatggcactgcccggtagctaaatgcggaagagataagtgctgaaagcatctaagcacgaaacttgccccgagatgagttctccctgactccttgagagtcctgaaggaacgttgaagacgacgacgttgataggccgggtgtgtaagcgcagcgatgcgttgagctaaccggtactaatgaaccgtgaggcttaaccttacaacgccgaagctgttttggcggattgagagaagattttcagcctgatacagattaaatcagaacgcagaagcggtctgataaaacagaatttgcctggcggccgtagcgcggtggtcccacctgaccccatgccgaactcagaagtgaaacgccgtagcgccgatggtagtgtggggtctccccatgcgagagtagggaactgccaggcatcaaattaagcagtaagccggtcataaaaccggtggttgtaaaagaattcggtggagcggtagttcagtcggttagaatacctgcctgtcacgcagggggtcgcgggttcgagtcccgtccgttccgccacttattaagaagcctcgagttaacgctcgaggttttttttcgtctgtatatctattattgccagaatcgcaaaaatcctctgcattttacgctctttttcctcaacagtctgaagcccataatcacctcagttaacgaaaatagcattaaaagaggcatattatggctatccctgcatttggtttaggtactttccgtctgaaagacgacgttgttattagttctgtgataacggcgcttgaacttggttatcgcgcaattgataccgcacaaatctatgataacgaagccgcagtaggtcaggcgattgcagaaagtggcgtgccacgtcatgaactctacatcaccactaaaatctggattgaaaatctcagcaaagacaaattgatcccaagtctgaaagagagcctgcaaaaattgcgtaccgattatgttgatctgacgctaatccactggccgagtccagacgatgaagtctctgttgaagagtttatgcaggcgctgctggaagccaaaaaacaagggctgacgcgtgagatcggtatttccaacttcacgatcccgttgatggaaaaagcgattgctgctgttggtgctgaaaacatcgctactaaccagattgaactctctccttatctgcaaaaccgtaaagtggttgcctgggctaaacagcacggcatccatattacttcctatatgacgctggcgtatggtaaggccctgaaagatgaggttattgctcgtatcgcagctaaacacaatgcgactccggcacaagtgattctggcgtgggctatgggggaaggttacagtgtaattccttcttctactaaacgtaaaaacctggaaagtaatcttaaggcacaaaatttacagcttgatgccgaagataaaaaagcgatcgccgcactggattgcaacgaccgcctggttagcccggaaggtctggctcctgaatgggattaagcctctctgacagctcctccgggagctgtttttacatgctcgctaaggaaatcgataaaagcccggatgcgcgtacttaccgcacggtcgctgtaatagacggcactgaatggcatttccactggcaacactttatctgccattaactccaccaattctccgcgagcgatttctttgtcgatcatgtagtcggacaaacacgcaatcccgttgccactcaggcaaagctgtttcagtgtttccccactattggaactcaaaccgtacttcacctcatgtaattgtccatcgctacgggctatcggccaggtattgagggaagcgggttcagtgaatcccaggcaaatatgttgctttaaatcgtcgatcgtttctggcttcccgtagcgggaaatataatcgggggaggcgataatttttcgataactgttaaataacggcctggcacgtaagctggaatccgttaacgtaccagcgcgtatcgcgacatccacttttctttcgatcaaattaataatcgtttcggaggagactaggctcaaagtgacttccggatagcgttcacggaaaggcttaattaacggcatcagaaagtgcagcaccactggagttgcggcatcgatccgtaacagtccacgcggtgtattacgcgtctccataatttcactttctgccgctgccatctcctgcaaaatactctgtacgcgacgaaaataacgctcgccttcttccgtcaggctaagttgtcgcgtggtccgattaagcaggctaacgccaagtttcatctccagctttttcaccgcccggcttaccgcactgtttgcttgccctaattgttccgctgcccggctaaagctgccgctttcgacgacgctaacaaaaatggcgagttcttcgctcgtggctttcatttttgctcctgttgcaaaatagaagagatattttgaatttatttgtcattaaaccatcaggatgcgtgatatgtcatgcgatttaatgttctccataatgagcaaaattctgaccggtgtaagcacttgcttacataacaatatacaattgctcgttgaaagagtgagctaaaatccctataacagtagaaccctcccgagtgcggaagggttgacgtaatagaggtttcaaagtcaaaagtgcgaaaaaacacctatgccatgcgctatgttgccggacaacctgcggaaaggatcttaccgccggggtcttttgcgagcatcggccaggcattaccacctggggaaccgttaagtaccgaagagcgtattcggatcctggtgtggaacatatacaaacagcaacgcgctgaatggttgagcgtattaaagaactacggcaaagatgcacatctggtgttattgcaggaagcgcagacaacgccagagttagtacagtttgcgaccgctaactatcttgccgccgatcaggtacccgctttcgtgctgccacaacatccttctggcgtaatgacccttagcgcggcacatccagtgtattgctgcccgttacgtgaacgagaacccattttgcgtctggcgaagagcgcactggtgacggtctatccattacctgacacccgcctgttgatggtggttaatatacacgccgtcaacttcagtctgggcgtggatgtctatagtaagcagttacttcctattggcgatcagatagctcaccacagcggcccggtcattatggcgggagatttcaatgcctggagccgtagaaggatgaacgcgttatatcgctttgcgcgggaaatgagcctgcgccaggtgcgttttaccgatgatcagcgccgtcgggcgtttggtcgcccgctcgattttgttttctaccgtggtctgaacgtcagtgaagcttctgtactggttacgcgcgcttccgatcacaatccgctactcgttgaattcagtcccggcaagcctgataaataaggtatgagtggtctgccacagggcagaccaacgtttggcgctgcgcaaaacgtgagcgcggtggtggcgtatgacttatctgcccacatgctggatgtcgtggcacaagctgccgaagcccggcaactgaaaaatatcaccacccgccagggatatgccgaaagtctgccatttgccgataacgcatttgatattgttatcagccgttattctgcccatcactggcatgatgttggtgcagcactgcgagaagtgaataggatattgaaacctggcggtaggctgattgtgatggacgtaatgtctccgggtcacccagtgcgcgacatctggttacagacggtagaagcattacgcgatacctctcacgtacgaaactacgccagcggtgagtggttgacgttaatcaatgaagccaatctgatagttgataatttaattacagataagttaccgctggaattttctagttgggtcgcgagaatgcgtacgccagaagcgttagtagacgctattcgcatttaccaacagagcgcaagcacagaggtgagaacgtattttgccttgcagaatgatggctttttcaccagtgatatcatcatggtagatgcacataaagcggcataaataaaaaaggcaccgggggaatcggtgcctttttattatctggtttgtcaggaatctggcatgttgttgtttttcacaaacaacgtcagcttatcgcctggttgcagattcgcagtgtcgctgttccagcgcatcacatctttgatgttcacgccgtggcgtttagcaatgctactaaggctatcgcctttgcgcacacgatacgtaatgctatcgctgttgtttgccagtcgctgtgcgctactgcctgcaccaatcgtcaaactttggcctggcttcagcttagatccgcgcagtttgttccactgctgcaaatctttggtgcttacgccgagacgactagcgatactactaagcgtgtcgccagagcgtacggtgtaaacacggctgttaagcggcgtattgtcggcaaccagcgtgctctgtacagcagcaatttcgccactagccagagattcacgcagttgatctgcatgcttctttggcaccatcacgtactgcgggccacttgcgcccagcgtggagccttttacgccagcgttgaatgtcttcagcttgctgacggaaatccccgccatatctgctaccttcgccatttcaaccgggctgctcaggtgcacacgcgccagagcacggctttcatcggtcgttggcagacgtacgccataacgcttgctgtttttgagaatatcactcaatgccagcattttaggcacgtactgcttcgtttcctgcggcaacggtaagctccagaagtccgtggatttcccacgcgctttgttcgttttaattgccttcatgacccgaccttcgccgctgttataagccgctacggtcagaagccagtcgccgtcaaacattttgttcagacgctgcatcatattcagcgcggcagttgcactagcaacaacatcgcgacgcgcgtcataattgcgggtctgtttcaaaccataattgcgccccgtgctcggaatgatctgccagatgcctgcggcattggcgccagacgttgcgtgaggatcaaaagcgctctccactatgggtagtagtaccagttccataggcatgttacgttttttaacttgccctgctatccagtacatatacggctctgcccgtaaagttacatcgtggagatagctcttattgcgtaaatatttctgtttctgttcgcgaatccggtcattttccggaattcccatctttagctcgtcgccaatgaaagcccacaagtcaccatctggcgcgatagacgtcccatcgtccatccatcgtgcctgacttgtaaactttgctgcttccccttgaccagctgcagaaaggctctgtgcgtgctgttgaacgttgccggtactctggcaacccacgagcaggacagaggcgagtaatatcgcttttgccttcatgtgtgtgtcaatagttgcttaaaagacgaccgatcataacggcgaacggagccgatgacaagaaagttttatcagaacctatctttcttactccttaaccatgcaaaacgctcttcaggttgttgcaataatgtttcttcattaattacattaattaaatcaatatcttccgttcttaaaaaaacattaatttgccgctcatttttcagaattacgggtagtgttatttgattttttgcccgtaactccttaactttacgataataatcatttatggacaaatcgtgcggaagaatactcaaagcaaacttcatattacttaaggtatattcatgagcacaacataccaatgtatcgtcaggtaacgcacttaactttttaagactttgatacatttgacttgctgtcccttcaaacaaccgaccacacccaccagaaaacagtgtgtcgccgcaaaatagataaggtttactgaagtaacagatatgtcctaaagtgtgacccggcgtagcaattacactaaattcatgccccaaaacgaaggcagtttcgccatctttgactacctgtgttgttcccttatcttgtgtctcttgtggaccatacaccacaatttgtggaaacttttccaccagttcttttacgccgccaacgtgatcgtggtgatggtgggtgagaaatatggcctccggttgccagttattggcggcaatggcgtttaatactggctctgcgtctccgggatcgacaatcaggcagcgacctgcttcatcattcaaaacccagatgtaattgtcatcaaaggcgggaatactgttaagattcatagattacctctcagtgtgaaacggaaggttgtgatgaaaccggcaagagtccctcaaactgtcgtggctcctgattgctggggcgatttgccctggggaaagctttatcgcaaggcgctggagcgccagctcaacccgtggttcactaaaatgtatggttttcatctgcttaagattggcaatttaagcgcagaaatcaattgcgaagcgtgcgcggtttctcatcaagtgaatgtttctgcgcaaggaatgcccgtccaggtacaggcggacccacttcatcttccttttgccgataaatccgttgatgtttgtctactggcacatacattgccgtggtgcaccgatccgcatcgtttattgcgtgaagccgatcgggtattgattgatgatggctggctggtcattagtggcttcaatcccatcagttttatgggattacgcaaacttgtgccggtattgcgcaaaaccagcccctataacagccggatgtttactctgatgcggcagctggactggctctctttgttgaattttgaagtgctacacgccagccgtttccacgttctcccgtggaacaaacacggaggaaaactattgaatgcgcatattcctgcgcttggttgcttacaacttattgttgcccggaaacggactattcctttaacgctaaatccgatgaaacagagtaaaaacaagccacgaattcgccaggcggttggagccacccggcaatgtcgtaaaccacaggcttaaacttcaacttggtagcctgtatcttccagtgtgggattcatcgccgcggcacgagccagttcatcacagcgttcgttttccgggtgtccggcatggcctttaacccattcccatttgatttgatgctgccccaatgcagcatcaagacgttgccagagatcgacattttttactggttttttgtctgcggttttccagccacgttttttccagttatggatccactgggtgataccctggcggacatactggctgtcggtactcaaaatgacttcgcaatgttcttttaacgcctccagcgcgacaatagcggccatcaactccatacggttgttggtggtgcgggtgtagccagcgctaaaggttttctcgcgtccgcgatagcgtaaaatagcgccgtaacccccaggtcctggattgcccagacagctaccatcggtgaaaatttctacctgtttaagcatctctggtagacttcctgtaattgaatcgaactgtaaaacgacaagtctgacataaatgaccgctatgagcactgcaattacacgccagatcgttctcgataccgaaaccaccggtatgaaccagattggtgcgcactatgaaggccacaagatcattgagattggtgccgttgaagtggtgaaccgtcgcctgacgggcaataacttccatgtttatctcaaacccgatcggctggtggatccggaagcctttggcgtacatggtattgccgatgaatttttgctcgataagcccacgtttgccgaagtagccgatgagttcatggactatattcgcggcgcggagttggtgatccataacgcagcgttcgatatcggctttatggactacgagtttagcttgcttaagcgcgatattccgaagaccaatactttctgtaaggtcaccgatagccttgcggtggcgaggaaaatgtttcccggtaagcgcaacagcctcgatgcgttatgtgctcgctacgaaatagataacagtaaacgaacgctgcacggggcattactcgatgcccagatccttgcggaagtttatctggcgatgaccggtggtcaaacgagcatggcttttgcgatggaaggagagacacaacagcaacaaggtgaagcaacaattcagcgcattgtacgtcaggcaagtaagttacgcgttgtttttgcgacagatgaagagattgcagctcatgaagcccgtctcgatctggtgcagaagaaaggcggaagttgcctctggcgagcataaatacctgtgaaaggcgctaaaaatagcgacttgggcgatttttgcagcaaacgattcaaaagatgagaaaaaccgttgacgaaggtcgaggcaatccgtaatattcgcctcgttcccaacggaacacaacgcggagcggtagttcagtcggttagaatacctgcctgtcacgcagggggtcgcgggttcgagtcccgtccgttccgccactattcactcatgaaaatgagttcagagagccgcaagatttttaattttgcggtttttttgtatttgaattccaccatttctctgttcaatgattttactctggcgtaggtgcgtgattctcgcttgttgtctcattcattaaaattcaataatgatatcgaaccattcagcttaaatatatttctagagaataaatttatattgattaaatgaatgtatatttcaaattgattttgtttgttattatttaagtgaggtatataattagagtccgttatcaatgctaaatattctaatcattatgacaggcgagggagtgtccaattatgaatagtaaaaagctttgttgcatatgtgtgttattcagcctgcttgcaggatgtgcctctgaatcttctattgatgaaaagaagaaaaaagctcaagtcacacaaagtaatattaataaaaacactccccagcaactgacagacaaagatttattcggtaatgaaaccactctggccgtatccgaagaggatattcaagctgcgcttgatggagatgagttccgcgttccccttaattctcctgtaatacttgttcaatccggcaaccgcgcaccggaaaccattatgcaggaggagatgcgaaaatattatactgtttccacattctctggtatcccggacaggcaaaagcctctgacttgtaacaaaaacaaagataaaaatgagaacgaggatgttgccagtgctgagaatatgaactggatgcaggcactgcgttttgtggctgcaaaaggacatcagaaagcgattattgtttaccaggatatgttgcagacaggaaaatatgactctgcgctgaaaagtacagtatggtccgactataaaaatgacaaactcactgacgctatctccctgcgctacctggtacgtttcacgctggtggatgtggcaacaggtgagtgggctacctggagcccggtgaattatgaatataaagtgcttccaccattgcccgacaagaatgaagccagtacgactgatatgacagagcagcaaatcatgcaacttaagcaaaagacctataaagcgatggtaaaagatttggttaaccgctatcaataataaattatatctgccgccaggaatttctggcggcaataatacaaaattctttgcataagaaatttttcttgacaaagacagtgcaagaaaggacatggaatccggagttaaaaactgtttgttttagaatatttaattatttaactgctgaatcttccttgcgagaaatatatccattattacatttcatgccatttttaatatagattgctcctgggaaaattcccgtattattaccgcaggggtgataattagtattgacatatcctgtgacaaaaggagctattaaaggtgctattacgatagctattagtaaaaatataagagttagctgtattgttatgtctgtggcgaaattgactaccttcgtttttttgattaagaatgattttattatcgtaagtaaaattacatgaatatttaaaaaggaaaacgacatgaaaccgaagcacagaatcaacattctccaatcataaaatatttccgtggagcattttattattgaatatagaggtttaactccggtaaaaaacaaagaagcattgaatgcagggaaaaataatatggccataaaaaacatcgaaagaaactcttttaatttaacatgtaaacgcatggttaatcctcatatcacgggtggagtgttaagaacatacataaatggagtcatgttttcccttttccatttatcaagttcctgttgccgttttagtccatctctaattgcatattttaatttttcacttaaatggcattgagcatcgatttcatttaaaacaactgtacacactatccctgtcagtaaaattgctcctccgacaagaattactggaaagccaaagctaacacaggcaaaagaagccagacttccaatagcggttgcaacaccaccggctataactgctttggccacatccatactaaaatcgccaagaaaattaaccagatctcgctcactactcataataaattctatggttctgctgatttaaccgcagagaagttcgccacagcaatccgaaaccactggcacgtggagaataagctgcacaggcgtctggacgtggtaatgaatgaagacgactacaaaataagaagaggaaacgcagcagaattatttagtgggatacggcacattgctattaatattttgacgaatgagaaggtattcaaggcagggttaagacgtaagatgcgaaaagcagccatggacagaaactacctggcgagtgtccttgcggggagcgggcttagctaataataccccgactctccccgtccttaaacacaacccccactcaccacaacctaaactcatccgcatcctgccatgccggaaacttttctctatattcccgcaatgctgccatgctcagctccgcatcaatgcgcgttgcctgatgcgcgtcggcagtagcgataatctctccttgcggattaatcacccggctgtcaccgcgataatggcagccgttgccatcgctgccgacgcgattgcatcccgccacatacgcctgattctcaatcgcgcgggccgtcagcaatgcctgccagtgcagagagcgcggagcaggccagttggcgacgtacagggcgaggtcataatcgttgagattgcggctccacacaggaaaacgtaagtcgtagcacaccagcggcaaaatacgccagccgcgccattccacaatcactcgcgcattgcccgctttataatgtagatgctcatctgccatgcggaacagatgacgcttatcataaaaatgtaccgtgccgcccggctcaaccagcaaaaagcggttaacgctaccagactccgtttgtaatgcaacactgcctgcaatcagcgcattgcactgctgcgccttagctgtcatccagttcactacgtcatcttgtgctaggctgctagctgccgcttccatggcaaagccgctggtaaacatctccggtagaacgatcacatcgcgcccggtaataccttccagttgacgatcaaaatgacgcaggttggcaggaccatccatccacaccagtggttgctgcaaaagcgtaatcttcaaaccaggcacggtgtacaactcctttatgcgaagggttttataactttaacaccttatcaggcagttgccttagcgcagaataaattgataacaaatgctgatattggaaatatctgatttgcaaattatcgtgttatcgccaggctttaggaggttaataacatgggcaggataagcagcggaggaatgatgtttaaggcaataacgacagtcgccgctctggtcatcgccaccagtgcaatggcgcaggatgatttaaccattagcagccttgcaaagggcgaaaccaccaaagctgcatttaatcagatggtacaagggcataagctgcctgcctgggtgatgaaaggcggtacttatactcccgcacaaaccgtaacgttgggagatgagacgtatcaggtgatgagcgcgtgcaaaccgcatgactgtggcagccaacgtatcgctgtgatgtggtccgagaaatctaatcagatgacggggctgttcagcactattgatgagaaaacgagccaagagaaactcacctggctgaatgtgaacgatgcgcttagcattgatggtaaaacggtgttgttcgcggcgttgaccggcagcctggaaaaccatccggatggctttaattttaaataattagcggataaagaaacggagcctttcggctccgttattcatttacgcggcttcaactttccgcactttctccggcaactttaccggcttcgtcgccagctcttccggatcaaagtcatcaacgttaatactgcgcagacggctttcttcagctttcaccagaatagcggcttcatctttatcaatcagccccttcaccagcgcgttgtgcgccagttcatccagacgggtaaacggcaggtttttacccagctctttacagatccgctgatgaattgggtcggcggcaatcacatccaccagcgcctcttccagcaagccaaccggattatgctcgctcggcgtcaggtactgaccgcgaccaatgcgggaacgggtggcgttcggcacttgtaaaatcttcgccactttatgatccagcttgtcagaaggtgccagataatgacgtccggtcgggaagatcaccacattcagcagcccggcaaccacgcggttcgggaagttttgcagtaaatcatccatcgcctgttcagcctgatacagcgcatcttgtacgccccagtgcaccagcggcaggtcggcttcattacggccttcgtcgtcataacgcttcagcacggcagaggcgaggtagagctggcttaaaatatcccccagacgggcgctgatgcgctcgcgacgtttcaggctgccgcccagcactgccatgctgacatcagaaagcagggcgaggttggcgctcaggcggttcaggtgctgatagtagcgtttagtggcatcgccggttggcgtgctgctggttaaaccgcgcgtcaggcccagccagaagctgcgaactttgttgctaccgacgtgaccgatatgtttgaacaacagtttatcgaacgcgttgacgtcattgttcttcgccgcttccatctcttccagcacgtacggatggcaacgaatcgctccttgtccgaagatcatcatgctgcgggtcagaatgttagccccttcaacggtgatggcaatcggtgcgccctggtaagcacgcgccaggaagttgctttgcccgagcataatgcctttaccgccggtaatatccatcgcatcaataatgttctgctgcccgcggtgggtacagtgatacttaacgatagcgctcagcacggcaggtttttcgccgagcataatgccgtaggtaatcaggcttgccgcagcatccatcacgtaggcattaccggcaatacgcgccagcggctcttcaatcccttccatcttaccaatagagattttgaactgacggcgaatgtgagcatacgcgccggttgccagcgctacgcttttcacgccgccggtactgttggaaggcagggtgatgccgcggcctacgctgaggcactccaccagcatccgccagccttgcccggccattttcggcccgccgatgatgtaatcgatcggcacgaagacatctttaccgcgcgtcggtccgttctggaacggtacgttcagcgggaagtggcgacgaccaatttccacgcccggcgtggtggttgggatcagcgcacaggtaatgcctaaatcttctgcaccgccgagtaatttttccgggtcggagagtttaaacgccagcccaagcacggtcgcaatcggtgccagcgtaatgtagcgtttgttccaggtcagacgcatccccagcacctgctggccctgccattcgcccatgcagacaatcccggtgtccggaatcgcgcccgcatcggaacccgcttccgggctggtcagtgcaaagcaggggatctcctgaccacgcgccagacgcggcagatagtgatctttctgctcgtcagtgccgtaatgttgcaacagttcgcccgggcctaaactgtttggcacgccgacggtaatcgccaggatcccgctcacgccggagagtttttgcagcacgcgagactgggcataagcgctgaactccagcccgccgtactcttttttgatgatcatcgcgaagaaacgatgctctttaaggtacgcccacaactccggcggcagatccgccagctcatgggtgatctggaaatcattcgccatccggcaggcttcttctaccgggccgtcgagaaacgcttgctcttcggcggtcaggcgcggctgcggatagttatgcagctttttccagtccggcttgccctggaacaagtcgccctcccaccaggtggtgcccgcatcaatcgcttctttctcagtgcggctcatcggcggcatcaccttacggaaaccgcgaaataccggcgcggaaatcatgctcttacgcataggcgcaaagttaaatggcacgaggataatggccagaggcaccagtacccacgcgctccacagaccagcaacgccgagggcggctgtccaggcgagcaaaatcagactgctgataaataagctcacgcggtgatagaacaacgcgccgagcaggacaaccgtagcgagaatactcaaaatcatcataacgaaaagccccttacttgtaggaggtctgaccacttgtgatgatatggttgtagtggatgtaaaaacatttagcaatatgtttacaatataattacaacaaagctcacattgttgctgtttttatccgcacttcaggtcaaaaagtcctggtcatagcacctgcccgtacttctcgcttttggcggtatccggtacactgcattttgtctattacatttatgctgaaggatatcctcatgtaccaggatcttattcgtaacgaactgaacgaagcggcggaaacgctggctaactttttaaaagatgacgccaatattcacgccattcagcgcgcggcggtcctgttagcagacagctttaaagccggtggcaaagtgctttcctgcggcaacggcggttcccattgcgacgctatgcactttgccgaagagttgaccggtcgctaccgtgaaaaccgtccgggctacccggcgattgctatttctgacgttagtcatatttcctgcgtcggtaatgatttcggtttcaatgatattttctcccgctacgttgaagcggtaggtcgcgaaggcgatgtactgctggggatctccacctccggtaactctgcaaacgtgatcaaagcgatcgcagcggcgcgtgagaagggaatgaaagtgatcaccctgaccggtaaagacggcggcaaaatggctggcacggcggatatcgaaattcgcgtaccgcactttggttatgccgaccgcattcaggagattcacattaaagtgatccatatcctgatccagttgattgaaaaagagatggttaagtaagtctggcgtaggccggataagacgtttacgccgcatccggcatttgtgcgctgatgcctgatgcgacgctgacgcgtcttatcatgcctacaaatctgtacgcgaaccgtaggccgaataatgcgttcacgccgcatccgacctgaaaattcttaaatcaatcttcgccgggggccatgcgctcccgctgttgtggaggttacccatgtgcgaattgctcgggatgagcgccaacgtccctaccgatatctgctttagtttcaccgggcttgtacagcgtggtggtggaaccgggccacataaagatggctggggcattaccttttacgaaggtaaaggctgtcgcacatttaaagatccacaacccagctttaattcccccatcgccaaacttgtccaggactacccgataaaatcctgtagcgtggtggctcatattcgccaggctaatcggggcgaggtggcgctggaaaatactcacccatttacccgcgagttatgggggcgtaactggacttatgcccataacggacaactgacgggctacaaaagtctggaaaccggcaacttccgcccggtaggcgaaaccgacagcgaaaaagccttctgctggctcctgcataaattaacgcagcgttacccgcgcacaccgggcaacatggcggcggtatttaaatatatcgccagtctggcggatgaactgcggcagaagggcgttttcaacatgctgcttagcgacgggcgctatgtaatggcgtattgcagcactaatttacactggatcacccgccgcgcgccgtttggcgtggcaacgttgctggatcaggatgtggaaatcgacttcagcagccagaccacaccgaatgatgtggtcacggtgattgcaacacagccgctgacgggcaatgaaacctggcaaaagattatgccaggcgaatggcgcttattttgcctcggggagcgtgtagtttgattattttgcctcggggagcgtgtagttacttgccagttgtggctgcacaacttcgtggcttaacggcttgctgaccacgtaacgaccattgaccacagaaacggttggtggcttacgggtttgctcaaagtagtcgtaacccggcttcagttgctcccagaagtccttaaagttggaatatttatggcgcttcatattggcgtcggtcatgcggaacgggtaaatactcacttgcacgctcggctgaccaaacaccagcgcaccagtaacgaactggaatatctcatcaataccctgattggtcattgcgtagcagccgatggaaacacaatcgccgtggatcatcaggtatttcccttcataaccatgcgcacggtcataggcattggggaaaccaatattaatcgctttgtagtaacggctgtctggttttaactgattacgctggacgctataaaacccttccgggcttttgaaatcgccctgacgctgttttggccctaagccgccggaatatttacagattttatagctgtcgagcagttgatattgctcgcccattttgacgtagagatcgagcgtacgttcttccttgaagatctggatgtagacaggggatcccatcaactgctgcttatactctttgctcacaggcgtggtagagctactgctgcccagcaaaccggcaaaactaacgcacgggatcaacaacatcgcaagaattaatgcgattttacgcatactgcttattccttgataaaacggttacacacgccaggacggcaaaatggatcccaaatcggaatagtctggatttggaaggctcacattatcaccaaaagagttttacgcaagcctgtcggcgcagggtttacaaatttcatcggaagcgggctttacccaaagagcgccgcgtgagttccagttctctcaaatcgtaaaagtttatcggtaagtttgtaaatcaggatccagtccggttcgacatgagcatcgcgataacctttccaactaccttgcagcgggtggtctttataaacagctggaagcggtaaagtattattgataagaagcgtcataagatatttcaatttattcatatccttatgacgcttttgtgcaagttttacatccttactatattgtccgctgtattcaatatccctttgaatcatatttaaattcctaatttatcaaataaatcatcggcgtctttggccttatgaacatcaatgccagcttcgctgtttttgatactttgaatggttaattgattaggctcgcgtaaatcaaacggcaatgccttttcacgcgcgacctttgtgagggttatgcgaaccaggtcagagatggtcagccccatcccggccagtacgtccgctgcctgattcttcagatcttcatcgattcgggcgcgaacaaacgcgttagcagccattggggtatctcctgtgctgtatatttattcagcttgaattgtagctcaaatgagcaacagcgacaatccatgagtaatttaataaacggatgtttttacataattaactgaaatatatatgttaattttataataatggtttattaagtttgttcagaaacgatccgggatacactgcaacattaaagcatgaccagccattattgagtatgtccttgccgagcattccatcctttgtattgagcggattactgttgatttgtttgccgttttctagttttgccagcgccaccacaagtcatatctctttcagctacgccgcccgccagcggatgcaaaaccgtgcgcgtttattaaaacagtaccaaactcatctgaaaaagcaggccagctatattgtggaaggcaatgccgaaagcaaaagggcgctacgccagcacaaccgggagcagataaaacagcatccagaatggtttcctgctccgctcaaggcgagtgacagacgctggcaggcgctggcggaaaacaaccactttttaagcagcgaccatctgcataacattaccgaagtggcgattcaccgcctggagcagcagcttggcaagccttacgtctggggcggtacgcggcctgataaaggctttgactgtagcgggttggttttttatgcctacaacaagatccttgaggctaagctcccgcgcacggccaatgagatgtaccactatcgccgggcaacgattgtggcgaacaacgacctgcgccggggagatttgctgtttttccatatccacagccgcgagatagccgatcatatgggcgtgtatttgggcgatgggcaatttatcgagagcccacgtaccggcgaaaccattcggataagccgattagccgaacctttctggcaggaccattttttgggcgcgcgcaggattttgacggaagagacgattttgtaagacggataaggcgtttacgccgcatccggcagttgtacgcaggtgcctgatgcgacgctggcgcgtcttatcatgcctacgagcccgcgaatatttgcgagccgctttcccgatataaaacaacctcattgccaacctttccttttcttcttaccgttgagaaaaaggagtcgccatgtctgaatatcgtcgttattacatcaaggggggaacatggtttttcacggtgaatttacgaaatcgtcgaagccaacttttgaccacccagtaccagatgctccgtcacgccattattaaagttaagcgagacaggccttttgaaatcaacgcctgggtcgttttgccagagcatatgcactgtatctggacattacctgaaggcgatgatgatttttccagccgctggcgggaaattaaaaagcaatttacccatgcttgtggattgaaaaatatctggcaaccacgtttttgggagcacgccatccgcaataccaaagattataggcatcatgttgattatatttatataaatccagtaaagcatggttgggtaaagcaagtgagtgattggccattcagtacgttccatcgcgatgtcgcgcgagggttatatcccatcgattgggcgggggacgtaacggattttagtgccggggagcgtatcattagttaattgtgcgcagatgcctgatgcgacgctagcgcgtcttatcatgcctacaaacttgtgccggatcggtaggccggataaggcgtttatgccgcatccggcagttatgcgcagatgcctgatgcgacgctggcgcgtcttatcatgcctacaaacttgtgcctgaacggtaggacggataaggcgttcacgccgcatccggcagttgtgcaccaatgctggatacttacatcaacgcccccataatcttcaactccagctcatccggcacttcgttatacgacagcacatgcagccccggcgcaaacaaccttgcataacgcgccagcaaagggcgcagctgcggtggcaccagcagcaccgggtctttccccgccgctttcatctgctctttcacctgtggcatcgtactctggaactggttgagcatattcggatcgaccggcacgctgtcgagcatcactttcccgccctgttgcgcctgattcaccacgttggtcagcagattttccagctcattattcagcgtatacaccgtcagctcctgcttgcgaacgaacggatgggtaatgctgcgccgcaatgccaggcgcacatcggccgccagcagaatatgatctttcgtcaccgtgctactggcgaccagcacggtggcgatggtgacgatatcgcgcagggaaacgccttcggtcagcagcgcccggtacactttcagcaactggctgtaattgagcgccgcgctcaaatcttccgccagacgcggtgccgtcgacgataaacggttatgcaactgcgtaatatcatcatagttaaacaaatcaggaatatagctgcgcacaatcttatttacatgggtagcgatcacgctggcgctgtcgatcacctgataccccatattcagcgccttcgctttctgcgccgcctggatccaggtgaccggcatcccgtacgccgggtcgttcccctgcacgccgtcaatctcgccgtaggtttcgctggagggcagggccatcagtttatccgccggaatatccgcttcatcagcctttatgccgttgatgaaaatggcgtactgactgggcttaaggcggaagttttcccgaatgcggatctccggcagcagcacgccgttgccgtcagaaatcacctgccgcacgccgcgaatccgctgggtgagcgggttaccctgtgctttgtccaccagcgccaccagtttgtaaccgaggcttaaactgataggctcgatcagcggaatggtttcccaactgacctgctgctcgctggtttcggtgatggtgcgggtcagcgtttcgaggcttttctcttccgcctccgccgccagcggctgtttgctcatccgccagccggtaaaaccaagcagggcgctgaacagcaaaaacggcaggtgcggcattcccggtaccaccgccagcacgaacataatcccggtggcggtgtagagcaccgacgggcttgccagcagctggttacgcacgtcatgggcgatatcgccgttgtcgctgacgcgggtgacgataatcgccgccgcggtggagagcagcagggaagggatctgcgccaccaggccgtcgccgatggtcatcagcacatactgctggaaggcagcatcggcgctcaggttgtatttgaagatcccgatacagacgccgccgatcaggttgatcgccagaatcatcatcccggcgatggcgtccccgcgcacaaacttcgatgccccgtccatcgcgccgtagaaatcggcctcgctggcaacatctttacgccgggtttgcgcctgcgcctggttgatcaatccggcgttaagatcggcgtcaatcgccatctgtttgccgggcatcgcgtctaaggtaaagcgggcagaaacctcggaaatacgctcggcccctttggtgacgacaataaagttgattgtcaacagcgtcagtaaatccgagcgtgaaagcattatcgccgcgctgcacgggcagtcgatttttaacggtggtgggctgtcgccgttaaataaaatcagcccgtctcatccgccaaaacctgccaccgtggcggtgccggaagagacggagaaaaaagcgcgtgatgtgaatgagaaaacggcgctgctgaagaagaaatccgccaccgagcttggtgagctggcaaccagtatcaacaccattgcccgtgatgcgcatatggaagcgaatctggagatggagattgttccccagggattacgcgtgctgattaaagacgaccagaaccgcgatatgtttgaacgcggcagcgcgaagattatgccgttctttaaaacgctgctggtggagctcgcgccagtgttcgactcgctcgataataaaattattattaccgggcataccgatgcgatggcctacaaaaacaatatctacaacaactggaacctttcgggtgaccgcgcgctttcggctcgtcgggtgctggaagaggccggaatgccggaagataaagtgatgcaggtaagcgcaatggcggaccagatgctgctggattccaaaaatccgcaaagcgcgggcaaccggcgcattgagattatggtgctgaccaaaagtgcgtccgatacgctgtatcaatactttggtcagcatggggataaagtggtgcagccgctggtgcaaaagctggataagcagcaggtgctttcgcagcgaacgcgttaaatgctgaatctttacgcatttctcaaaccctgaaatcactgtatactttaccagtgttgagaggtgagcaatgcgtaaaatcattcatgtggatatggactgctttttcgccgcagtggagatgcgcgacaatcccgccctgcgcgatatccctattgctattggcggcagccgcgaacgtcgggggggtgatcagcaccgccaattatcccgcgcgtaaatttggcgtacgtagcgctatgccgacagggatggcgctcaaattatgcccacatctcaccttgcttccggggcgctttgacgcctacaaagaagccagtaatcatatccgtgaaatcttcagccgctacaccagccgcattgaaccgttgagtctggatgaggcttatctcgatgtcaccgatagcgtccattgccacggttctgcgaccctcatcgcccaggaaatccgccagacaatcttcaacgagctgcaactgacggcgtctgcgggcgtggcaccagtaaagtttctcgccaaaatcgcctccgacatgaataaacccaacggccagtttgtgattacgccggcagaagttccggcatttttacaaaccttaccgctggcaaaaatccccggcgtcggcaaagtcagtgcggcaaaactggaagcgatggggctgcggacctgcggtgatgtacaaaagtgtgatctggtgatgctgcttaaacgctttggcaaatttggccgcattttgtgggagcgtagtcaggggattgacgaacgcgatgttaacagcgaacggttgcgaaaatccgtcggcgtggaacgcacgatggcggaagatattcatcactggtctgaatgtgaagcgattatcgagcggctgtatccggaacttgaacgccgtctggcaaaggtaaaacctgatttactgattgctcgccagggggtgaaattaaagttcgacgattttcagcaaaccacccaggagcacgtctggccgcggctgaataaagctgatctaatcgccaccgcgcgtaaaacctgggatgaacgccgcggcgggcgcggtgtgcgtctggtggggctgcatgtgacgttgcttgacccgcaaatggaaagacaactggtgctgggattatgatgtatactattatgtatattctggtgtgcattattatgagggtatcactgtatgcatcgaattctcgctgaaaaaagcgtcaatatcactgagttacgtaaaaacccagctaaatactttattgatcaaccggttgcggttctttctaataatcgccccgcaggatatctcttaagtgccagcgcattcgaagcgttaatggacatgcttgctgaacaagaggagaaaaagcccataaaggcgcgcttccgtccaagtgctgcaagattagaggaaattacacgccgcgctgaacaatatcttaatgatatgacggatgatgatttcaatgactttaaggaataaggatgcgggtattcaaaacaaaacttattcgcctgcaacttacagcagaggaacttgatgcgttaacggcggattttatttcctataagcgtgacggtgttttgccagatatatttggtcgcgatgcactctacgacgactcctttacctggccattaatcaaatttgagcgagttgctcatattcatctggcaaatgagaataatccatttccgccacagttgcgccaattcagcagaacgaatgacgaagcgcatttggtatattgtcagggggcgtttgatgagcaagcatggttgctcattgccattctgaaacctgaacctcataaactggctcgagataacaaccaaatgcataaaattgggaaaatggcagaagcgtttcgcatgcgtttttgaatttatattatgaataacatacaaataagaaactatcagcctggcgattttcagcaactatgcgctattttcattagagcggttacgatgaccgccagtcagcattatagtccacaacaaatttccgcctgggcgcagattgacgaatctcgctggaaggagaaactcgcgaaaagtcaagtgtgggttgcgatcattaatgcacaaccggttggttttatttcccgcattgaacattatatcgatatgttatttgttgaccctgaatacacccgccgtggggttgccagcgctttgttaaaacctttgattaagtctgaatccgaacttacggtggacgcaagcataaccgcaaaacccttttttgaacgttatggttttcagacagttaagcagcagcgcgttgaatgccggggagcgtggtttactaatttttatatgcgatataaaccgcaacattaaatccagcttgcaatgaaaataacgcccgcctggtatgtgcgcgttttctgattccacaaactgcaaggaggtaaatcatgacaaatcctttatcaatgactctttgcagacctttccaggattaattctttttttcttgccctggattcgtctgccatttcctgatttttatatttatatactctaaataattcgagttgcaggaaggcgacaagcgagtgaatcgccaggagcttacataagtaagtgactggggtgaacgaacgcagtcgcagtacatgcaacttgaagtatgacgagtataaatggaatggtacatgggcaaatatattcgtcccttatccgatgcggtatttaccatcgcatctgatgacctgtggatcgagagtttagcgatccaacaattacacaccacggcaaatttacccaacatgcagcgcgtagtggggatgccagatttacaccccggacgcggctacccgattggcgcagcgttcttctctgttggtcgtttttacccggcaagacgtcgcggtaacggtgctggaaacagaaacgggccgctactctgacacactgcgtagcgcgctggtttctctcgatggcgataacgcatgggcattaagcgaaagctggtgtggcactattcagtggatttgtccgagtccgtatcggcctcatcatgggcgcaaaaactggtttctgggcattgggcgttttaccgctgatgagcaggaacaaagcgatgcaatccgttatgagacgctgcgtagcagcgggccgggcggtcaacatgtcaataaaaccgacagcgcggtacgcgccacgcatttggcatccggtattagcgtgaaggttcagagtgagcgtagtcagcatgctaacaagcggctggcacgattgctgattgcctggaagctggagcaacagcaacaggaaaatagcgcggcgctgaaaagccagcggcgaatgttccatcaccagattgaacgtggcaacccgcgacggacatttacagggatggcttttatcgaaggataatgaaggatgaaactgccggaaggcgattaaacgccatccggcagcaaatcaaataattacttcgccggaatttctttcagcagttcagtcagcagtgtccagtaatgacctacgctttcgatgtgaacttgctcatccggagagtgtggaccggtgatagttggcccgatagaaaccatgtccatttccggatacggttttttgaacagaccacattccaggcccgcgtggataatctggatgttcggcgtcttgttgaacaggcgctgataggtttcacgtaccagatgcatcaccggagaattagcgtccggctgccagccaggatatgcgcctttcgcttcggttttcgcgccagccagtttacccaggctatccagcatgctcaccacgtagtctttaccgctgtcgatcagactacggatcaggcagtgaatttctacgttattgtcagtcatggtcaccacaccgacgttcagggaggtttcaaccacacctttggctacatcggagttacgaatcacaccgttcggggtggcgttcagcagacgaataaaggtatcgcgagatttcgcaatcagggcagctttatcgttcgctacagagtccagcaacaaggccagatttttctctttttctgccagctcgtttttcaggatctcctgataggtattcaccagagatttcaggacgtcgactttatcagctgcgacagcaatggtcgcaaaggcttcacgcgggatggcgttacgcagtgtgccgccgttgaaatcgataaggcgcagatccagttcttccgcatgacccgccaggaagcgcaccagcagtttgttggcattacccagcccaacgtggatttccccgccggagtgaccgcctttcagaccttttaaggttaacttgaaggtttcaaaaccagctggaaccgcttcacgatctaaatgcaggttggaggtgaagtcgataccccccgcacaacccatgtagatttcaccttcttcttcggagtcggtgttaatcagaatatcagcctgcaaccagttgccctgtaagccgaacgcaccgtccataccggcttcttcggtcatggtcagcagcacttccagcgggccgtgaaccacgttttcgtcagccagaaccgccagcgcagaggccataccaatgccgttatccgcacccagcgtggtgccgcgcgctttaacccattcgccatcaatataaggctggataggatctttcgtgaagtcatgcacggtgtcgttatttttctgcggcaccatatcgaggtgggcctgtaagacgaccggtttacgattttccatacctgcggtagcaggtttacgaatcaggatattacctacctgatcgcgttcgacatggaaacctttctcttttgcccaaccaacaatgtattcagcgagttgctcttcatgataggacgggtgaggaatagaacagattttggcaaaaatatcccacagcggctgtggagataattgagacagttcagacacgttaagtctccttgtcgatcacccgcaaaacagtattgcaggtcacagggttagcagaaaatgttgtcaacacaagacaggcttgcgagatatgtttgagaataccactttatcccgcgtcagggagaggcagtgcgtaaaaagacgcggactcatgtgaaatactggtttttagtgcgccagatctctataatctcgcgcaacctattttcccctcgaacactttttaagccgtagataaacaggctgggacacttcacatgagcgaaaaatacatcgtcacctgggacatgttgcagatccatgcacgtaaactcgcaagccgactgatgccttctgaacaatggaaaggcattattgccgtaagccgtggcggtctggtaccgggtgcgttactggcgcgtgaactgggtattcgtcatgtcgataccgtttgtatttccagctacgatcacgacaaccagcgcgagcttaaagtgctgaaacgcgcagaaggcgatggcgaaggcttcatcgttattgatgacctggtggataccggtggtactgcggttgcgattcgtgaaatgtatccaaaagcgcactttgtcaccatcttcgcaaaaccggctggtcgtccgctggttgatgactatgttgttgatatcccgcaagatacctggattgaacagccgtgggatatgggcgtcgtattcgtcccgccaatctccggtcgctaatcttttcaacgcctggcactgccgggcgttgttctttttaacttcaggcgggttacaatagtttccagtaagtattctggaggctgcatccatgacacaggcaaacctgagcgaaaccctgttcaaaccccgctttaaacatcctgaaaccagcacgctagtccgccgctttaatcacggcgcacaaccgcctgtgcagagcgcccttgatggtaaaaccatccctcactggtatcgcatgattaaccgtctgatgtggatctggcgcggcattgacccacgcgaaatcctcgacgtccaggcacgtattgtgatgagcgatgccgaacgtaccgacgatgatttatacgatacggtgattggctaccgtggcggcaactggatttatgagtgggccacccaggcgatggtgtggcaacaaaaagcctgtgcggaagacgatccgcaactcagtggtcgtcactggctgcatgcggctacgttgtacaacattgccgcctatcctcatctgaaaggagatgacctggccgagcaagcgcaggctttgagtaaccgcgcctatgaagaggccgctcagcgtctaccgggcacgatgcggcagatggagtttaccgtacccggcggtgcgcccatcaccggctttttgcatatgccgaaaggcgatggcccgttcccgacggtattaatgtgtggtggtctggatgcgatgcagacggactattacagcctgtatgaacgttattttgcgccgcgcggcattgcgatgctgactattgatatgccgagcgtgggcttttctagtaaatggaagctcacccaggactccagcctgttgcatcagcacgtcttaaaggcgctgcctaacgtaccgtgggtggatcacactcgcgtcgcggcctttggtttccgtttcggcgctaacgttgccgtgcgtctggcataccttgaaagcccgcgtctgaaagcggttgcctgtcttggtccggtagttcataccctgttgagtgattttaagtgccagcaacaggtgccggaaatgtatcttgacgttctggccagtcgtttggggatgcatgatgcttccgatgaagcgttgcgcgtggagctgaatcgctatagtttaaaagtgcaaggattgctgggacgtcgctgcccaacgccaatgttaagtggctactggaagaacgatccgttcagcccggaagaggacagtcgcttaatcaccagtagttctgctgacggtaaattattagagatcccatttaacccggtgtatcggaattttgacaaaggtcttcaggaaatcaccgactggatcgaaaaacgcttgtgttaaaaatttgctaaattttgccaatctggtaaaacagttgcatcacaacaggagatagcaatgacgttaccgagtggacacccgaagagcagattgatcaaaaaatttaccgcactaggcccgtatattcgtgaaggtaagtgcaaagataatcgattctttttcgattgtctggctgtatgcgtcaacgtgaaaccggcaccggaagtgcgtgaattctggggctggtggatggagctggaagcgcaggaatcccgttttacctacagttaccagtttggtctgttcgataaagcaggcgactggaagagtgttccggtaaaagacactgaagtggttgaacgactggagcacaccctgcgtgagtttcacgagaagctgcgtgaactgctgacgacgctgaatctgaagctggaaccggcggatgattttcgtgacgagccggtgaagttaacggcgtgagtgaaatgtgccggatgcatcacatccggcaatattcattaaaactgatacgtcatgccaaccgcgacaatatcatcattattaatattcaatttgttatcgctatccagttggttgattttataatcaacaaacgcactcatatttttgttgaaataatacgtagcaccgacgtcgatataattgaccagatcttcatcaccgataccttcaatatctttccctttgcttaagacataacccaggcttggacgcagaccaaagtcaaactggtattgagcgaccgcttcaaagttctgtgtcttattggcaaagccgccagttattggcgtcattttgcgtgtttcagaatagaaagttgccagataaatattattggcatcgtatttcagacctgttgcccatgcttctgcacgcttgcctgtgccacggctttgcaggttctgctcgttggtgcgatcactgttggtataggccccactaatggcgaaatcgctgccgccaaagtcatatgtcaaactcgtgccgaagccatcgccgttttgctttttaacgtcgcggttttcgtttttcccttgatattgcagggttaagttcaggccatcgataacgccgaagaagtcggtgttccgatacgtcgccagaccgctggcgcgtttggtcataaagttgtcggtctgcgcgctggaatcgccaccaaattccgggaacatatcggtccaggcttccacgtcatacaacgcccccaggttacgaccataatcgaaagaacccaaatctttatatttcaacccggcaaaagcgagacgcgttttttgctgtgcagtatcactctctgctttattaccggcaaactctgcttcccaacgaccataaccagtcagttgatcgttaatttgtgtttcgcctttgaaaccaaaacggatataactctggtcgccatctttactggcgttatcactcatataatgcatggctttaactttgccatagacatccagtttattaccgtctttattatatatttctgcagcctgtacagatgcagatgccacaatgcccatcaccactaatgccagagtgctctttttcattttcattcctgattttaattaacgcgcgaatattcagcgggagagtcccgttgaaaacaggaaagtttttaacctgagattgttaaagatatattacagattaataatattcttaaaatgtggtaatttattaaatctgtaataaaagcgtaaacaactgccgctaggcttgctgatcccgcgcaacaaaacgccatgctttgctcgcagatggttggcaaccgacgacagtcctgctaaaacgttcgtttgatatcatttttcctaaaattgaatggcagagaatcatgagtgacagccagacgctggtggtaaaactcggcaccagtgtgctaacaggcggaagccgccgtctgaaccgtgcccatatcgttgaacttgttcgccagtgcgcgcagttacatgccgccgggcatcggattgttattgtgacgagcggcgcgatcgccgccggacgtgagcacctgggttacccggaactgccagcgaccatcgccagcaaacaactgctggcggcggtagggcagagtcgactgattcaactgtgggaacagctgtttagcatttatggcattcacgtcgggcaaatgctgctgacccgtgctgatatggaagaccgtgaacgcttcctgaacgcccgcgacaccctgcgagcgttgctcgataacaatatcgttccggtaatcaatgagaacgatgctgtcgctacggcagagattaaggtcggcgataacgataacctttctgcgctggcggcgattcttgcgggtgccgataaactgttgctgctgaccgatcaaaaaggtttgtataccgctgacccgcgcagcaatccgcaggcagaactgattaaagatgtttacggcattgatgacgcactgcgcgcgattgccggtgacagcgttagtggcctcggaactggcggcatgagtaccaaattgcaggccgctgacgtggcttgccgtgcgggtatcgacaccattattgccgcgggcagcaagccgggcgttattggtgatgtgatggaaggcatttccgtcggtacgctgttccatgcccaggcgactccgcttgaaaaccgtaaacgctggattttcggtgcgccgccggcgggtgaaatcacggtagatgaaggggcaactgccgccattctggaacgcggcagctccctgttgccgaaaggcattaaaagcgtgactggcaatttcagccgtggtgaagtcatccgcatttgcaacctcgaaggccgcgatatcgcccacggcgtcagtcgttacaacagcgatgcattacgccgtattgccggacaccacagccaagaaattgatgcaatactgggatatgaatacggcccggttgccgttcaccgtgatgacatgattacccgttaaggagcaggctgatgctggaacaaatgggcattgccgcgaagcaagccagctataaattagcgcaactctccagccgcgaaaaaaatcgcgtgctggaaaaaatcgccgatgaactggaagcacaaagcgaaatcatcctcaacgctaacgcccaggatgttgctgacgcgcgagccaatggccttagcgaagcgatgcttgaccgtctggcactgacgcccgcacggctgaaaggcattgccgacgatgtacgtcaggtgtgcaacctcgccgatccggtggggcaggtaatcgatggcggcgtactggacagcggcctgcgtcttgagcgtcgtcgcgtaccgctgggggttattggcgtgatttatgaagcgcgcccgaacgtgacggttgatgtcgctagcctgtgcctgaaaaccggtaatgcggtgatcctgcgcggtggcaaagaaacgtgtcgcactaacgctgcaacggtggcggtgattcaggacgccctgaaatcctgcggcttaccggcgggtgccgtgcaggcgattgataatcctgaccgtgcgctggtcagtgaaatgctgcgtatggataaatacatcgacatgctgatcccgcgtggtggcgctggtttgcataaactgtgccgtgaacagagcacaatcccggtgatcacaggtggtataggcgtatgccatatttacgttgatgaaagtgtagagatcgctgaagcattaaaagtgatcgtcaacgcgaaaactcagcgtccgagcacatgtaatacggttgaaacgttgctggtgaataaaaacatcgccgatagcttcctgcccgcattaagcaaacaaatggcggaaagcggcgtgacattacacgcagatgcagctgcactggcgcagttgcaggcaggccctgcgaaggtggttgctgttaaagccgaagagtatgacgatgagtttctgagtttagatttgaacgtcaaaatcgtcagcgatcttgacgatgccatcgcccatattcgtgaacacggcacacaacactccgatgcgatcctgacccgcgatatgcgcaacgcccagcgttttgttaatgaagtggatagctccgctgtttacgttaacgcctctacgcgttttaccgacggcggccagtttggtctgggtgcggaagtggcggtaagcacacaaaaactccacgcgcgtggcccaatggggctggaagcactgaccacttacaagtggatcggcattggtgattacaccattcgtgcgtaaataaaaccgggtgatgcaaaagtagccatttgattcacaaggccattgacgcatcgcccggttagttttaaccttgtccaccgtgattcacgttcgtgaacatgtcctttcagggccgatatagctcagttggtagagcagcgcattcgtaatgcgaaggtcgtaggttcgactcctattatcggcaccattaaaatcaaattgttacgtaagatcttatcattctcccaccaaaaaattatcttaatgtaacagctggtgtaagtaaattctatcaacgaagatcaatcttatctactgaccaaaaaggcctgatagggcttcgctcactatacatccttggctgcaggtttagttgtacaccactcctaaatttaatgtgttggcaatgtgttcaataaagctcgaacaaattagctcattatgatcggttaatacttcaacttctggttgcatgattgtttgtccgtaaaaagataacgcgcctgccgggtagtagcaggcgcattacgcaataggtaaacaagggaggaagttcagaaatgtaaatcgggaaggttgtacgcaatgttcatcgtactacgttgttacggctttgccgcaacaagccagttgcctgccgcgctcgcagaatgtctgcagcccggagataaggagattgttcctgccagctaaatcccttcctgtcgatacgaaccagctcgtatttttctaccagaaaattcacggcatcggctagggtgataccggcatcgatagtctgtatcaggaatgttcgggttaaatatcagcaaaaagcccgcatcatgaatactggatatgaagcatgagagttacctcagtgtttatataaggattcggtccccctctctggaacggtaactctcaatctgatcggttcctgcgttagttcacatcacgactcattttttcgctctcaccggcatcccatttgccacaaaatatcccgccgtgctcctcggcagcgcttcctgtccacgaatcatatccgctattttctcgccaatcataattgtcgtggcgttcaaattcccggtgataatctgcggcataatgctcgcatccaccacacgcaggccttctaacccgtgtacgcggccttcgccgtcaaccacggacatctcgtcgtaacccattttgcaggtaccgcacggatggaaggcggtttcggcgtggttacgcacgaactcatcgagctgttcatccgtctggcattcgacaccggggctgatttcgcggccacgatactgatccagcgcgggttgatgcatgatctcgcgggtgatgcgaattgcgtcgcggaactcctgccagtcctgctcgtggctcatgtagttaaacagaatcgccggatgctggtgcgggtcgcgggatttaatccgcacatgcccacggcttgggctgcgcatactgccgacgtggcactggaaaccgtgctctttcactgcattgctgccgttatagttaatcgctactggcaggaaatggtactgaatattcggccacgcaaattcctcacggctgcgaataaatccacctgcttcaaagtggttgctggcaccaacgccagtgccgccaaacagccactccgcaccgattttcggctggttccaccactgcagggcagggtagagggaaaccggttctttgcactcatattgcagatacatctccagatgatcctgaagattttcgccgacgccgggtaattcatgcaccagcggaatatcaaactccgccagcagttcagcgttgccgacgccggagcgttgcaggatctgcggactggcaatcgcgcctgcacataacagcacttctttgttggccgttgcgcgggttgggatggtgctgtcgccttccagccattcgacgcccaccgcgcgtttgccgtcaaaaatgatgtgatcggtcatagcgtgagtacgaatggtcaggttaggacggcttttggcctgatcgagatagccacgcgcggtgctggcgcgacggccctgcggcgtgacggtgcgatccatcggaccaaaaccttcctgctgataaccgttgagatcgtccgtgcgcgggtagcccgcctgcacgcccgcttcaatcatcgcttcaaacagcggattgacgccgggtttggaggtagtgacgctcaccgggccatcaccgccgtgatagtcgttttcacccatatcgcgagtctcggccttgcggtagtagggcaggcagtcgaggtagctccagttctccagaccgggttcttgcgcccagttatcgagatccagcgcattgccacggatgtagcacatgccgttgatcaggctgcttccacccagacctttaccgcgtccgcactccatgcggcggttattcataaacggttcaggttccgtttcataggcccagttgtagcgtttaccctgtagcgggaatgccagggcagcgggcatctgggtgcggaagtcaaagcgatagtccgggccgcccgcttcaagcagcagcacggaggtattcggatcttcagtcagacgggtagcgagaacgttgccggcactgccggcaccaataatgatgtagtcaaattgcaaataaacctcctggttagaatatggactggaatttagccatctcaacctggatggacttcacctgggtgtaactctggagcgtcatcacgccgttctcgcgaccaatgccggagtgtttgtagccgccaacgggcatctctgccggggattcgccccaggtgttgatccagcaaatacccgcttccagctgatgaatgacgcgatgcgcgcggttcaggtccgctgtcacgatgcccgccgccaggccgtagtcggtatcgttagcgcggcgaatgacttcgtcttcgctctcgtaggtcagaatggacatcactggcccgaagatctcttcacgcacgatggtcatatcgtcgctgcaatcggtgaacactgtcggtgcaacccatgcgccgttatcgaagccatcgcctttcagtacatcgccgccgcacagtacgcgcgcgccttcctctttgcctttggcgatatagcgcagcacgttatcgcgatgcgggaagctgaccagcgggccgaagttagtttgcggatcgaaaacgtcgcccgcgcgaatgcgctcaacgcgcgccagaattttctgctcaaatgcggctttgcatttcgccggaacgaagacgcgggtgccattggtacacacctgaccggagctgaagaagtttgccatcatggcgatatcggcggcgagatcgagatccgcatcatcgaaaacgatcagcggacttttaccgcccagttccatggtcacttctttcagggaagaggccgcgctgttagccatcacttttttgccgctggcgacaccgccggtaaaactcactttggcaatgcccggatgctcggtcagatattgcccggtctccgcgcccacgcccggcaacacgttaaatacgccgtccggcaggcccgcttcgctgtaaatttcagccagctttaacgcggtaagcggggtaacttcgctcggtttgaaaatcattgcgttgcctgccgccagcgccggggcggatttccacagggcaatctggatcgggtagttccatgcgccaatccctgccactacgcccagcggttcgcggcgggtatacacaaaggacgtttcacgcaacgggatctggctgccttccagcgccgggatcagcccggcgtagtactccagcacgtccgcaccggtaacgatatcgacggtactggtttcgctatatgcttttccggtgtcgagggtttccagttttgcgagttcgtcattgcgttcacgcagaatatcaacggcccgacgcagaatacggctgcgctccatggcggtcatgctcgcccagattttttgcccctgctgggcgcttttcacggcgcgatcgacatcctcgcgcccggcggcctgcacggtcgccagcacgttaccgttggccgggttaatggtctcgaaggtgcgaccgctggtggcggaggtataaccaccatgtatataaagctgctgttctgccattcgggacatcacgtctcctcggttaatcggtgggtagatgctgagtgataaagtggcgggtcagggaattagcgcgggttttatccagcggtttgccgctcagagccgcgcgcagccataatccatcaatcagcgcggccaggccgtagcccgcttcctgtgcctgttcgcgcggcaattcgcgacgaaactcgctcaccagattgctcagcaagcggcggctgctgacctgctgtaaacgatagagcatcggctgatgcatactgctggcccagaacgccagccaggctttcatcgccgcactgctcacctgcgtttcatcgaagtttccgccaacaatcgcctgtaatcgctgctctgcactgccctgcggaagtgcatgtaatcgattcaaaaccgcgtcacgcagctgactggtgatatcgcgcatggttgcttccagcagaccatttttgtccctgaaatagtggctgatgatccccgtagaaacgcctgcacggcgggcgatctgcgcgatcgttgcatcgtgcatgcccacttcatttattgcttccagtgtggcgtcgatcagttgtctgcgccggatgctctgcatccccaatttgggcattttcgccactccattcatcagcggtgtttatctattaaagcggttattgattggacgttcaatataaaatgtgtcttaattgttacgaatttgattttaaatagtaacaataacagtggggatactggatgacagaccttagtcacagcagggaaaaggacaaaatcaatccggtggtgttttacacctccgccggactgattttgttgttttccctgacaacgatcctgtttcgcgacttcagcgccctgtggattggccgcacgctggactgggtttctaaaaccttcggttggtactatctgctggcggcaacgctctatattgtctttgtggtctgtatcgcttgtagccgttttggtagcgtgaagctcgggccagaacaatccaaaccggaattcagcctgctgagttgggcggcgatgctgtttgctgccgggatcggtatcgacctgatgttcttctccgtagccgaaccggtaacgcagtatatgcagccgccggaaggcgcgggacagacgattgaggccgcgcgtcaggcgatggtctggacgctgtttcactacggcttaaccggctggagcatgtatgcgctgatgggcatggcgctcggatactttagctatcgttataatttgccgctcaccatccgcagcgcgctgtacccgatcttcggtaaacggattaacgggccgataggtcacagtgtggatattgcagcggtgatcggcactatcttcggtattgccactacgctcggtatcggtgtggtgcagcttaactatggcttgagcgtactgtttgatattcccgatagcatggcggcgaaagcggcactgatcgccttgagcgtgataatcgccacgatctctgtcacctccggtgtcgataagggcattcgcgtgttaagcgagcttaatgtcgcgctggcgctgggattgatcctgttcgtattgtttatgggcgacactagcttcctgcttaatgcactggtgctgaatgttggcgactatgtgaatcgctttatgggcatgacgctcaacagttttgccttcgaccgtccggttgagtggatgaataactggacgctcttcttctgggcatggtgggtggcatggagcccgtttgtcggcttgttcctggcgcgtatcagccgtgggcgtaccattcgccagttcgtgctgggcacgttgattattccgtttaccttcacgctgttatggctcagcgtgttcggcaatagcgcgctgtatgaaatcatccacggcggcgcggcatttgccgaggaagcgatggtccatccggagcgcggcttctacagcctgctggcgcagtatccggcgtttacctttagcgcctccgtcgccaccattactggcctgctgttttatgtgaccagcgcggactccggggcgctggtgctggggaatttcaccagccagcttaaagatatcaacagcgacgcccccggctggctgcgcgtcttctggagcgtggcgattggcctgctgacgctcggcatgctgatgactaacgggatatccgcgctgcaaaacaccacggtgattatggggctgccgttcagctttgtgatcttcttcgtgatggcggggttgtataaatctctgaaggtagaagattaccgccgtgaaagtgccaaccgcgataccgcaccgcgaccgctggggcttcaggatcgcctgagctggaaaaaacgtctcagccgcctgatgaattatccgggcacgcgttacactaaacagatgatggagacggtctgttacccggcaatggaagaagtggcgcaggagttgcggttgcgcggcgcgtacgtggagctaaaaagcctgccaccggaagagggacagcagttgggtcatctggatttgttggtgcatatgggcgaagagcaaaactttgtctatcagatttggccgcagcaatatagcgtgccgggctttacctaccgcgcacgcagcggtaaaagcacctactaccggctggaaaccttcctgttagaaggcagccagggcaacgacctgatggactacagcaaagagcaggtgatcaccgatattcttgaccagtacgagcggcaccttaactttattcatctccatcgtgaagcgccgggccatagcgtgatgttcccggacgcgtgattgttattgcataaaaccgcgccatgtctgcatatggcgctgtttctcctacctcttgatacgttatatctatacggttaagcccttagtatctattgatgattaccagacaacagataataaaaaagaaaagaactattgcagcccaaaacctacatttgggctgttgcgaatgttcaataagtttagtcttatttaatgtaaatattgctgatcatttgaaatgacgcattattcatgagaaatgtgtatcgtaaatcaactgaaattaacgcaaccatttgttatttaaggtttaattatctgtgtgtgatattttattgaatgttttaaatattgtttttattggcattgctataatattggttatcatttgctgaatggattcagtcttaatgagtgggtttttaagggacaggcatagagtaatgatacgtatgcataaccaacatctttactcattatgtcattgaatgttgacgctatgtgtttatgagggagaggtattttcagttgatctggattgttaaattcatataatgcgcctttgctcatgaatggatgccagtatgtagtgggaaattataaatattgaaatagtccaactacttctttattaccaaaaatgagtatctgaattttaatattgcattcttgcgtgattatctcctgagtttgacttgtgattacctttttaaggtatttagcgtaactgtttttgagcgagcatcagaggtaaagataatcttcttgatagtgatgtgggatgttatacgtatggcatcgctgatgtttatggttaccccttatgtgtgctcaggaatcgacaggtaatcactcatactgaacagcgataaaagataaaggtgtgttcatgaatagttgtgattttcgtgtttttctgcaagagttcggtacaacggttcatttgagtttgcctggtagcgtatccgagaaagaacgactgctactcaagctgctgatgcagggaatgtctgtaacagaaataagtcagtacagaaatcgcagtgcaaagacaattagtcatcaaaagaaacagctctttgagaaactggggattcagagcgatattactttctggcgcgatattttctttcagtacaatccggagatcatatccgccacggggagtaatagtcacagatatattaatgataatcactatcaccatatcgtcacgcctgaagccatcagtctggcgttggaaaaccacgaattcaaaccgtggatccaaccggttttctgcgcgcagactggcgtactgacgggctgtgaggtgcttgtccgctgggaacatccacaaacgggaattatcccaccggatcagtttattcctctggcggagagttccggtcttattgtcataatgacccgccaactgatgaaacagactgcggatattctgatgccggtaaaacatttgctgccggacaatttccatattggcatcaacgtcagcgcgggttgttttttggcagcgggatttgaaaaagagtgtctgaacctggttaataaattaggtaacgataaaatcaagctggttctcgagctaacggaacgtaaccctattccggtaacgccagaagccagagcgatatttgacagccttcatcagcacaacattacctttgcgctggatgactttggtacgggttatgcgacctatcgttacttgcaggcgttcccggtcgattttattaagatcgataagagttttgtgcaaatggcgagtgtcgacgaaatctccggtcatattgtggacaatattgtcgaactagcgcgtaagcctggtctgagtatcgtggcggaaggggtagaaacccaggagcaggcggatttaatgatcggtaaaggcgttcactttttgcagggctatttgtactctccgccagtaccgggtaataaatttatctctgaatgggtaatgaaagcaggtggttgatgtaaaccgctattcacagcgcatcgggaggttggcagcgattaattctcccgatgcagtaaatcctgatagatccccgttaatatgccatttggcgcaaattgttttttaatccactgcgtcacctgacccgtagcagaatgctgagtcgccagtaacatgcggctatcctggcgcggattatggatttgtcgggtaaccagcagggattgcgtcatcgcctcacggaccatgtaatccggcaaaaaaccaattccttcacctaaaatctggcactgacatttggtgttgaaatctggcaccagaatactctcctgcccgtgcagcaaccagcccacttttttattaatcgtatgcgcggtgtcctccaccataatattagggtagagacgcagttggctttcggcgatgggttccggcacaaaggctaacgggtgatccggggcgatagcaaaagcccagcgaatcgcgccaatttcagtgtaatcaataccgccgccgtccagtagtgtatcgggtgcgccgatggcgatattggcctgattattaataatcgcatcccagacgccgttatacacttcggtggtgacggtaatctggcaggtaggaaactgctttttcagcacctgtaacaagcgtgcggtgtgtttgggcgtataaagcagctgattaatacaaatgcgcacacgcgcttctatgccctggctaatagtatcgattctgcgtttgatggcataaaaatcattcagcaggtcggtagctttgcggaaaaaataacgcccggactccgttaactcaatgctgcgggtactgcgagtgaacagcaccacatccagccccgtctccatacgcttaatggtgtagctaatggcggaagtggttaaacccaactcttctgcggctttactgaagctgccaaaacgcgcagcggtagtaaatgccaacagattctcttcggtaaaaatactgttcattaaaccattctcgccattatctactatgaatttctccagctatgactgtagaggtatcggttaaagatagataatcatttttgaataacttttaatacccgtcgcgtttagtcgtcgcttcgcttaatttttgtccaccatattcactaattacccccacgcagttacccgccagaaaacccagtaacgtcaccgtccagttcatcccgctggcaaaaaacagcgtcatgccgagaaagccaccgggaataaaggacagtaaccagaaacgcccttgccagaccactaccgcgctgaagggtacggtagtaattacgctcgcccagaacgcggacagtccacttacagaggccagccaaccagcagtcagcgcggcgaaaaacgcccacaccatcccggaataattaaccgccagacttctgataaacccgcttttaccgccgcctgcggcataaaaactgcaaaaggcgacgaagccaatggttcctaataattcccatccttgagagagcccgacatgactagacactaactgccaaagccctgcacaaataccgacggtgacacccgttgccgtgagtccgttcatcttgttcccctctggttagacatggacgaaagctactcttacatgtgcagactatagagaaataaaacctgattgagtgaaagggtatcgggtcaaagaaacaaatattgcactaccgcacactgcgaaaagattgttgaatattattcaacaaaaaggcgagatacggcgaattaaatttaagcgggttcttttatcagattatcgttgctattctcaattcatcgaaaacagccacaaaaaccaggggaatgtgaatgagtataaaaaatctacctgccgactatttattggctgcacaacagggtgatatcgataaagtaaaaacctgccttgcgctgggtgtcgatattaatacctgcgatcgtcaggggaaaacggcaattacgctggcaagtttatatcagcaatatgcttgcgttcaggcattaattgatgccggagcggatattaataagcaagattatacctgtttaaatccttttttaattagctgtctgaacgatgatttaacgctactacgaattattttaccggctaaacccgatcttaattgcgtaacccgttttggcggtgtcggcctgacgcctgcctgtgaaaaaggccatttaagtattgtaaaagagcttttggcgcatacggagattaacgttaaccagaccaaccatgtaggctggacgccgctactggaagcgattgtgcttaatgatggtggtattaaacagcaggcgattgtgcagttattgctggaacacggtgccagcccgcatctgaccgataaatatggcaaaacgccactggaactggcgcgggaacggggctttgaagagattgcgcagttactgattgccgcaggtgcataaaccgggaggcttgctatcaacacaccagaaagacggtgtgtgtgggcgctaactgcggatgcggattttctggcgcagcgggggcaaggacaggttgaacaggtctttgccagagcggtaaatatcgcactcccggctcgccagcagttgctgacgctgctttgtgaagagtacgacaatgcgccaaacagttgtcggttggcactcactcactttgatgatctgttccggcatggtgataaggttcagtttgacgatcaaggtattacggttggtcaacatcttcatatagagatgagtcgttgtcggcgttggctgtccccaaccttgcaaatgaccgctgtgaattttcaccttatcgcctggctacagtggcacgacattattcatcagcacctgggggaaaatgaaaccctgtttaattatcgcggcgataatccgttttatcaggcgttaaataaagaattacatattaaacgacgggcagttattcaggccgtaaacgataaacaaaatatcgccagtgcggtcgccagtatgatggggttagggattggccttacgccaagtgccgacgattatttaacaggtctggcgcttattttatttattcccgggcatccggcggaaaaatacaaagaggaattttatctcggtctgcaacgcggcaaaaataataccacattattaagtgccataacgctggaagccgcattacaacaacgctgccgggaaaatattcatcgttttattcacaacattatttatgacatccctgggaacgcaactcaggcaatagaaaaaattaaacatattggctccagttccggctgcgacatgctgtatggcatggccgatggttgtgcgctgagccaaacctacggagggaattatgtcagttaattaaccaaacctacggagggaattatgagtgttaaaatagtcattaaaccgaatacctattttgattctgtcagcctgatgtctatctccacgcgtgcaaataaactcgacggcgtcgagcaggcatttgtggcgatggcgaccgaaatgaataaaggcgtgctgaagaatttaggactgctgacgccggagctggagcaggcgaaaaacggcgacctgatgattgtcatcaatggtaaaagcggtgcggacaacgagcagttactggtggagattgaagaactgttcaacaccaaagcgcaaagcggcagccacgaggcgcgttacgccactattggcagcgccaaaaagcatatcccggaaagtaacctggcggtgattagcgtcaacggtctgtttgccgctcgcgaagcgcgtcaggcgctgcaaaacgatctcaacgtgatgctgttttccgataacgtcagtgttgaagatgaactggcgctcaagcaactggcccacgaaaaagggctgctgatgatggggccagactgtggcacggcgattatcaacggcgcggcgctctgttttggtaacgccgtgcgtcgcggcaacatcggtattgttggcgcatccggcaccggcagtcaggagttgagcgtccgcattcatgaatttggcggcggcgttagccaactgattggcaccggcgggcgcgacctgagcgagaaaatcggcggcctgatgatgctcgacgccatcgggatgctggaaaacgatccgcaaactgaaatcattgcgcttatctccaaaccgcctgcgcctgcggtggcccgcaaagtgctggaacgtgcgcgcgcctgccgcaagccggtggtcgtctgcttcctcgatcgtggcgaaacgccagtggatgagcaggggctacagtttgcccgcggcaccaaagaggcagcgctaaaagcggtgatgctctccggcgtgaaacaggaaaatctcgacctgcatacgcttaaccagccgttgattgcggatgtgcgtgcgcgtctgcaaccgcagcagaaatacattcgtggcctgttctgcggcggcacgctgtgcgacgaaaccatgttcgcggtgatggaaaaacatggcgatgtctacagcaacattcagcccgatccggaattccgcctgaaagatatcaaccgcagcatcaaacacaccttcctcgactttggcgatgacgacttcaccaatggcaagccgcacccgatgattgaccccaccaaccgcatcagtcgcttgatcgaagaggcgcgcgatccagaagtggcggtgatcgtgatggattttgtgctcggatttggaagccatgaagatccggtcggctccaccatcgagacgatcaaagaagcgaaagcgatcgccgctgccgaaggacgcgagttgatcattctcgcctatgtgctgggtaccgatcttgatacgccaagcttagaacaacaaagccagatgctgcttgatgccggagtgattctggcgagcagcagcaccaataccggattgctggcgcgtgaatttatctgcaaaggggaggaagcctgatgagccagagtctgtttagccaaccattgaacgttattaacgtcggcatcgccatgtttagcgatgacctgaaaaagcagcatgtagaagtgactcaactcgactggacgccgccggggcagggcaatatgcaggtggtgcaggcgctggataacattgccgatagcccgctggcggacaaaatcgccgccgctaaccagcaggcgctggagcgtattatccagagccatccggtgctgattggttttgatcaggcgattaacgtggtgccgggcatgacggcgaaaaccattcttcacgccgggccgccgatcacctgggaaaaaatgtgcggcgcgatgaaaggcgcggtcaccggagcgctggtgttcgaaggactggcgaaagatctcgacgaggcggctgaactggcggcttccggggagatcaccttcagcccgtgtcacgagcacgactgcgtgggaagcatggcgggtgttaccagcgccagcatgtttatgcacatcgtaaaaaacaaaacctacggcaacatcgcttataccaacatgagcgagcagatggcgaagattttgcgtatgggcgctaacgaccagagcgtgattgaccgcctgaactggatgcgtgatgtgcagggaccaatactgcgcgacgcgatgaaaattatcggcgaaatcgatctgcgcttaatgctggcgcaggcgctgcatatgggcgatgagtgccataaccgcaataacgccgggacgacactgctgattcaggcgctgacgccggggattattcaggcgggttattccgtcgagcaacagcgcgaagtgtttgagtttgtcgccagcagcgactacttctccggcccgacgtggatggcgatgtgtaaagcggcgatggatgcggcgcatggcatcgaatacagcaccgtggtcaccaccatggcgcgtaacggcgtcgagttcggcctgcgggtcagcggcctgccggggcaatggtttaccggcccggcgcagcaggtgatcggcccgatgtttgccggttataagccggaagatagcgggctggatatcggcgacagcgccatcaccgaaacctacggtattggcggatttgctatggcgaccgcgcccgctatcgtcgcgctggtgggcggcacggtggaagaagctattgatttctcccgtcagatgcgcgaaatcaccctcggtgaaaaccccaacgtcaccattccgctgctcggttttatgggcgtgccgagcgcaatcgacatcacccgcgtgggtagcagcggcattctgccggtgatcaacaccgccatcgcccataaagatgcgggcgtcggcatgattggcgcgggcattgtgcatccaccttttgcctgcttcgagaaagccattcttggctggtgcgaacgttacggcgtctgacctacatgttcatgccggatgcggcgtgaacgccttatccggcctacgaatggcgcaagaatctgtaggcctgataagcgtagcgcatcaggcatttgtcaccattgccggatgcggcgtgaacgccttatccggcctacgaatggcgcaagaatctgtaggcctgataagcgtagcgcatcaggcatttgccaccactgccggatgcggcgtggacgccttatccggcctacgagtggcgcgagaatctgtaggcctgataagcgtagcgcatcaggcatttgtcaccattgccggatgcggcgtgaacgccttatccggcctacgagtggcgcgagaattgtaagcctgataagcgtagcgcatcaggcagtctggcgttggtcataaccccatcaccctctgtagcggacataacaacatgaaagagcttgtggtcgttgccattggtggcaacagcattatcaaagataacgccagccagagcattgagcatcaggcggaggcggtgaaagccgtcgccgatacggtgctggaaatgctggcttccgattacgacattgtgctgacccacggcaacgggccgcaggtcgggctggatttacgccgtgcggagattgcccacaagcgcgaagggctgcccttaacgccgctggcgaactgtgtggcagatacgcagggcggcatcggctatctgatccaacaggcgctgaataaccggctggcgcgtcacggcgagaagaaagccgtcaccgtggtgactcaggtggaagtggataaaaacgatccaggttttgcccatcccaccaagcccatcggcgcattctttagtgacagccagcgtgacgaattacaaaaggcaaaccctgactggtgttttgttgaagatgccgggcggggctatcgccgcgtggtcgccagcccggaaccgaaacgtattgtcgaagcacctgccattaaagcgctgatccaacaaggttttgtcgtaattggcgcgggcggcggtggaattccggtagtgcgtactgacgcgggagattaccaaagcgtggacgcggttatcgacaaagatctctctaccgcgctgctggcccgtgaaattcacgccgacattcttgtgatcaccactggcgtcgaaaaagtgtgtattcactttggcaaaccgcagcagcaggcgctcgatcgggtggatattgccaccatgacccgctatatgcaggaagggcatttcccgcccggcagcatgttgccaaaaatcatcgccagcctgacatttttagaacaaggcggcaaagaagtgattatcaccacgccggaatgcctgcctgcggcgctgcgcggcgaaacgggcactcatattattaaaacgtaaggacgtaagatgaaagaaagcaatagccgccgtgaatttctgagccagagcggtaagatggtcaccgccgccgcgctgtttggtacctctgtgccgctcgcccatgcggcggtagctggcaccctaaactgcgaagcgaacaacaccatgaaaatcactgacccgcattactatctcgataacgtgctgctggaaaccggttttgactacgaaaatggcgtggcggtgcagacccgcacggcgcgccagaccgtggagattcaggacggcaaaattgtcgccctgcgcgagaacaagctgcatccggacgccacgctgccgcactatgacgctggcggtaagctgatgctgcccaccacccgcgacatgcatattcatctcgacaaaaccttttacggcgggccgtggcgcagcctcaatcgtccggcaggcaccaccatccaggacatgatcaaactcgagcagaaaatgctgccggaactgcaaccgtacactcaggagcgggcagaaaaactgattgatttattgcagagcaaaggcaccaccattgcccgcagccactgcaatatcgaaccggtttccggcctgaaaaatctgcaaaatttgcaggcggtgctggcgcgacgtcaggcgggctttgagtgtgaaatcgtcgccttcccgcagcacggtttgctgctgagcaaatctgaacctttaatgcgtgaagcgatgcaggcgggggcgcattacgtcggcggcctggacccgaccagtgttgatggcgcgatggaaaaatccctcgacaccatgttccagattgcgctggactacgacaaaggcgtcgatattcacctgcacgaaaccactccggcaggcgtggcagccatcaattatatggttgaaacggtagagaaaacgccacagctgaagggcaagctgaccatcagtcacgcctttgcgctggcaacgctcaacgagcaacaggtagatgaactggcgaaccggatggtggtgcaacaaatttctatcgccagcacggtgccgattggcacgctgcatatgccgctcaaacagttgcacgacaaaggcgtaaaagtgatgactggcactgacagcgttatcgaccactggagcccttatggtctgggcgacatgctggaaaaagccaatctgtacgcgcagctctatattcgtcctaacgaacagaacctctcccgcagcctgtttttagccactggcgatgtattgccgctgaatgaaaaaggcgagcgtgtatggccaaaagcgcaggatgacgccagctttgtgctggtggacgcctcctgttccgccgaggcggtggcgcgtatcagcccgagaaccgcaacgttccataaagggcaactggtgtgggggagtgtggcaggttgatgcgcatttgaaacgcctgcaacggtgaatagtaagagatttaagccccagggagtggggcaatctgaatatgagtgtgtcggcagaaatggacattatctttgaggaatatgcccttattgacgttgtgtagataactatttgtctacgtgaaaagatcatcagttttgccgattttagtcttttacagatagcaaatatcacacttacaggcgctcgccttatggggaacgttgctgctctgtttcattcaggctcgcggcatgttggggctggatcgggtggtttaaatattggctatattcaatggacgcgttttgccgcgatgacatatcaggcgttgccaaatacacatagctaatcaggagtaaacacaatgaagatcaaagctgttggtgcatattccgctaaacaaccacttgaaccgatggatatcacccggcgtgaaccgggaccgaatgatgtcaaaatcgaaatcgcttactgtggcgtttgccattccgatctccaccaggtccgttccgagtgggcggggacggtttacccctgcgtgccgggtcatgaaattgtggggcgtgtggtagccgttggtgatcaggtagaaaaatatgcgccgggcgatctggtcggtgtcggctgcattgtcgacagttgtaaacattgcgaagagtgtgaagacgggttggaaaactactgtgatcacatgaccggcacctataacagcccgacgccggacgaaccgggccatactctgggcggctacagtcaacagatcgtcgttcatgagcgatatgttctgcgtattcgtcacccgcaagagcagctggcggcggtggctcctttgttgtgtgcagggatcaccacgtatagcccgctacgtcactggcaggccgggccgggtaaaaaagtgggcgtggtcggcatcggcggtctgggacatatggggattaagctggcccacgcgatgggggcacatgtggtggcatttaccacttctgaggcaaaacgcgaagcggcaaaagccctgggggccgatgaagttgttaacagtcgcaatgccgatgagatggcggctcatctgaagagtttcgatttcattttgaatacagtagctgcgccacataatctcgacgattttaccaccttgctgaagcgtgatggcaccatgacgctggttggtgcgcctgcgacaccgcataaaagcccggaagttttcaacctgatcatgaaacgccgtgcgatagccggttctatgattggcggcattccagaaactcaggagatgctcgatttttgcgccgaacatggcatcgtggctgatatagagatgattcgggccgatcaaattaatgaagcctatgagcgaatgctgcgcggtgatgtgaaatatcgttttgttatcgataatcgcacactaacagactgaaaaaattaataaataccctgtggtttaacatattaacttcgctctccacttaactttttagttaaggagagcgaaataatatcaaagtagcagtaaaacctataacgtaaatttaaattgttaaattaacgccctccagtacacaatacttcacacgttagttatgagcgatttctgatagtgcctggtttaatcagagctttattatctgcgacgtttatttttatttaagagagatcgcgatgataagtttaaaagctccgcacaataatttgatgccatatacgcaacaaagcatacttaatacggttaaaaacaatcagttaccagaggatatcaaaagctccctggtttcctgtgtcgatatattcaaggttttgattaaacaatattatgattatccttatgattgtcgtgatgatttagtcgatgacgacaaactcattcatctcatggctgccgtacgagactgtgagtggagtgacgataacgcactcaccataaatgtgcagtttaatgatttccctggattttatgactggatggattaccctgatcacccggttaagtttgtttttcacatacttgaaaatcaaaaagggacagtttgggtatatgaccaggatgatgcgtttcttgatattaaagcaaacgtgcaggctggacgctttaccgggcttaagaaattagtgcagtttatcgatagtgtgcgaacagattgcaaatgtattcttcttgaataccatatgcctttgctgagaattttccctaaagggaaagagtgtatgcatgtggaaaaatggcttcgcgaaatgagctctattccggagacagacgcgcccattaagcaggcgcttgcgcatggattattattacacttaaaaaatatctaccctgtttttcctgaaagtctggtgatgttattgctctctgttctggacgtaaaaacatacagagatgatgcgcgattaaatgaatggatatctaatagagtgcaggaattaggtgacagatattatcctgtaaataagcacgttaaaatccgctacactctttaattcagaaagggttccacctgcaagttgttattccacctgagagtgaatcgcaatgcaggtaatcatttcatctgtatatctgtatgccaactggcattccatctcttttttcgccgatattttgttgtgatcggcgacacttcgcttaaaaaagcaccagtagtggtttcgcagccatgcggtgtataaaaaatgatctcatgcagatgttttgtgaatgtgttggttgacattcatatgaaaaaaatcataattccatcatgtttgtgtggggtcttttctgtatcttacgcatcgcactcaagcctgacagaaaatatgctgtaaggctcatatcaaaaaccgccattagctcatcaggaagagcagacgacaaccaggattgttgtatggtacggggttcgaggcctcgatggcggtccaacttttcaaaactcttctgaatcagatccccttattaagttccctgcaaagtggaacattgccattgtttggctatagtggatggggcagaccaatgaaaaaagcccacacaggggagagtgggctgaaatgggaggctaaagacagtagtaaacttatcggaaataaggaccacgcattacgggggctaagtagcccgatggccgtgattcggcaaatcaggttgattacgtaaagagtaaattatctgctcaccgctgcgtcaccccttcgtaaatcaggcgtagcgcgaatacaccaataattgcaccaataacccgactggcaacgcgttgcatacgcccataagcacgacgcacagcgggcaaagaaaacgcctgactaagaaaaactcgccagataatacttgcgagcacaatccccgcccaggccattaaacgtgcccatgttggtgtttctgcatttaatgttacactgaaaatactgataaaaaataaaacggtttgcgggttagagagatcggtaattaatccgcggcgaaaaaagacataccagggggcgctaatcggttgttgtagtgtgctcatttgcggtgtactctggcggcgcatgctgcaccacgcaaaccataagagataagcgccgccgacgattctgataaggctaaaaatctcctcacactgcgtaattagcgttgcaagaccaaacaaacccaacccggaataaaatgcatcgcccagcgccacgcccagcccggtcagcacccctgcgcgtcgaccggaagccaggctggtttgtactaccacaaagagattggctcccggattaaaaaaagtaatcacgaacagtcctacggtcaggtaaacggcatgcaaaggatccatagtgatttcatccataaataagtgaactaactgcatcatatttctaccaaaaataatcgggtgcgagagagatcacaaagtgtcttatttccggttactggcgtttatgccctgactgaactaattattaatcaacccaataatgtgggtgggtgatagtgtgataacaactctggagccgtaatatgaaaataatctctaaaatgttagtcggtgcgttagcgttagccgttaccaatgtctatgccgctgaattgatgaccaaagcggaatttgaaaaagttgaaagccagtatgaaaaaataggtgatattagtaccagcaatgaaatgagcactgcagatgcaaaagaagatttgatcaaaaaagcggatgaaaaaggggctgatgtgttggtactgacctccggtcaaactgacaataagatccacggcacggcaaatatttataagaagaagtaattctgaatcctatgtaaacatctccgatgcgtaagtttatcggtgatcatctattgaaatttatgccggataaagcgttcgcgctgcattcggcagttcagcttttcagccgccgccagaacgtcgtccggctgatgcctaaataattcgccgctgctgttttatcgccattaaatttctccagtgcctgttgtggtgtcagtaagcgtggagcgggagttttcgcgctctcgcgcgccagttccggcagtagcagttgcataaactgcggcgttaaatccggcgtcggttccacacttaaaaacagcgccagtcgttccatcatattgcgcagttcacgaatattgcctggccagtcgtagtgcagcagcacagtttcacttgcctgtaacccctggcgtaatgcagcagaaaatggggcggagagcgccgccagagacactttcaaaaagctttccgccagcggaagaatatccgccacccgctcgcgcagtggtggcaattgcagacgcaaaatactcagccgataaaacagatcacggcgaaaacgtccttgctgcatatcttcttccagattgcagtgagtggcgctaatgacccgtacatctaccggaacaggctgatgcccgccgacgcgggtgacctctttttcttccagcacccgcagcagccgggtctgcaaaggtagcggcatttcgccaatctcatccagaaacagcgtaccgccgtgggcaatttcgaacagcccggcgcgacctccgcgtcggctgccggtaaacgccccttcctcatagccaaacagttctgcttccagcaggctttcggcaatcgccccgcagttgacggcaacaaacggatggctctttttgccctgtcgcgcatcgtggcgggcaaaatattcccgatgaatcgcctgggccgccagctctttgcccgtccccgtttccccctcaatcaacaccgccgcactggagcgggcatacagcaaaatagtctgccgtacttgttccatctgtggactttgaccgagcatatcgcccagcacgtaacgagtacgcagggcgttgcgggtggcatcgtgagtgttatggcgtaagctcatgcgcgtcatatccagcgcatcgctgaacgcctggcgcacggtggcggcggaatagataaaaattccggtcattccggcttcttctgccaaatcggtaatcagccctgcgccgaccaccgcttcggtgccgttagcttttagctcgttaatctgcccgcgtgcgtcttcctcggtaatgtagctacgttggtcgaggcgcaaattaaaggttttttgaaacgccaccagcgctggaatggtttcctgataggtgacaacgccgatagaagaggtgagttttccggcttttgccagtgcctgtaacacatcgtagccgctcggtttaatcaaaataactggcacactcaggcggcttttcaggtacgcgccgttagagccagccgcgatgatggcgtcacagcgttcgtttgccagtttcttgcggatgtaggtcactgctttttcaaagccaagctgaataggggtaatgttcgccaggtgatcaaactcgaggctgatatcgcgaaacagctcgaacaggcgcgttacagataccgtccagataaccggtttgtcgtcattaagccgtggtggatgtgccatagcgcaccgcaaagttaagaaaccgaatattgggtttagtcttgtttcataattgttgcaatgaaacgcggtgaaacattgcctgaaacgttaactgaaacgcatatttgcggattagttcatgactttatctctaacaaattgaaattaaacatttaattttattaaggcaattgtggcacaccccttgctttgtctttatcaacgcaaataacaagttgataacaaaggatgggctatgtctctacactctccaggtaaagcgtttcgcgctgcactgactaaagaaaatccattgcagattgttggcaccatcaacgctaatcatgcgctgttggcgcagcgtgccggatatcaggcaatttatctttctggcggtggcgtggcggcaggtagcctggggctgcccgatctcggtatttctacccttgatgatgtgctgaccgacattcgccgtatcaccgacgtttgtagcctgccgctgctggtggatgcggatatcggttttggttctagcgcctttaacgtggcgcgcaccgtgaaaagcatgattaaagccggtgcggcaggattgcatattgaagatcaggttggtgcgaaacgctgcggtcatcgtccgaataaagcgatcgtcagcaaagaagagatggtggatcggatccgcgcggcggtggatgcgaaaaccgatcctgattttgtgatcatggcgcgcaccgatgctctggcggtagaggggctggatgcggcgatcgagcgtgcgcaggcctatgttgaagcgggtgccgagatgttgttcccggaggcgattaccgaactcgccatgtaccgccagtttgccgatgcggtgcaggtgccgatcctcgccaacatcaccgaatttggtgccacgccgctgtttaccaccgacgaattacgcagcgcccatgtcgcaatggcgctgtacccacttagtgcgttccgcgccatgaaccgcgccgctgaacatgtctacaacgtcctgcgccaggaaggcacgcagaaaagcgtcatcgacaccatgcagacccgcaacgagctgtacgaaagcatcaactactaccagtacgaagagaagctcgacaacctgtttgcccgtagccaggtgaaataaaaaacgcccgttgattgtattcgacagccgatgcctgatgcgtcgctgacgcgacttatcaggcctacgaggtgcactgaactgtaggtcggataagacggatggcgtcgcatccgacaaccgatgcctgatgcgccgctgacgtgacttatcaggcctacggggtgcactgaactgtaggtcggataagacgcatagcgtcgcatccgacaaccgatgcctgatgcgccgctgacgcgacttatcaggcctacggggtgcactgaactgtaggtcggataagacgcatagcgtcgcatccgacaaccgatgcctgatgcgccgctgacgcgacttatcaggcctacggggtgaactgaactgtaggtcggataagacgcatagcgtcgcatccgacaacaatctcgaccctacaaatgataacaatgacgaggacaacatgagcgacacaacgatcctgcaaaacagtacccatgtcattaaaccgaaaaaatctgtggcactttctggcgttccggcgggcaatacggcgctctgcaccgtgggtaaaagtggcaatgacctgcattaccgcggctacgatattcttgatctggcgaaacattgcgaatttgaagaagtggcgcatctgctgatccacggcaaactgccgacccgtgacgaactcgccgcttacaaaacgaaactgaaagccctgcgcggtttaccggctaacgtgcgtaccgtgctggaagccttaccggcggcgagccacccgatggatgttatgcgcaccggtgtttccgcgctcggctgcacgctgccagaaaaagaggggcataccgtctctggcgcgcgggatattgccgacaaactgctggcgagccttagcagcattctcctttattggtatcactacagccacaacggcgaacgcatccaaccggaaaccgatgacgactccatcggcggtcacttcctgcatctgctgcacggcgaaaagccaagccaaagctgggaaaaggcgatgcatatcagcctggtgctgtacgccgaacacgagtttaacgcctccacctttaccagtcgggtgattgcgggcaccggctctgatatgtattccgcgattattggcgcgattggcgcactgcgcgggccaaaacacggcggggcgaatgaagtgagcctggagatccagcaacgctacgaaacgccggacgaagccgaagcagatatccgcaagcgcgtggaaaacaaagaagtggtcattggttttggtcatccggtttacaccatcgctgacccgcgccaccaggtgattaaacgtgtggcgaagcagctcagccaggaaggcggcagcctgaagatgtacaacatcgccgatcgcctggaaacggtgatgtgggagagcaaaaagatgttccccaatctcgactggttctctgctgtttcctacaacatgatgggcgttcccaccgagatgttcacaccactgtttgttatcgcccgcgtcaccggctgggcggcgcacattatcgaacaacgtcaggacaacaaaattatccgtccttccgccaattatgttggaccggaagaccgcccgtttgtcgcgctggataagcgccagtaaacctctacgaataacaataaggaaacgtacccaatgagtgctcaaatcaacaacatccgcccggaatttgatcgtgaaatcgttgatatcgtcgattacgtcatgaactacgaaatcagctctaaagtggcctacgacaccgcacattactgcctgctcgacacgctcggctgcggtctggaagctctcgaatacccggcctgtaaaaaactgctggggccaattgttcccggcaccgtcgtacccaacggcgtgcgcgtccccggaactcagttccagctcgaccccgtccaggcggcatttaacatcggcgcgatgatccgctggctcgatttcaacgatacctggctggcggcggagtggggccatccttccgacaacctcggcggcattctggcaacggcggactggcttagccgcaacgcggtcgccagcggcaaagcgccgttgaccatgaaacaggtgctgaccgcaatgatcaaagcccatgaaattcagggctgcatcgcgctggaaaactcctttaaccgcgtcggcctcgaccacgttctgttagtgaaagtggcttccaccgccgtggtcgccgaaatgctcggcctgacccgcgaggaaattctcaacgccgttagcctggcgtgggtggacggtcagagcctgcgcacctatcgccatgcgccgaacaccggcacgcgtaaatcctgggcggcgggcgatgccacttcccgcgcggtacgtctggcactgatggcgaaaacgggcgaaatgggttacccgagtgccctgactgcgccggtgtggggcttctacgacgtctcctttaaaggtgaaagcttccgcttccagcgcccgtacggttcctacgttatggaaaatgtgctgttcaaaatctccttcccggcggagttccactcccagacggcagttgaagcagcgatgacgctctatgaacagatgcaggcagcaggcaaaacggcggcggatatcgaaaaagtgaccattcgcacccacgaagcctgtattcgcatcatcgacaaaaaagggccgctcaataacccggcagaccgcgatcactgcattcagtacatggtggcgatcccgctgctattcgggcgcttaacggcggcagattacgaggacaacgttgcgcaagataaacgcattgacgccctgcgcgagaagatcaattgctttgaagatccggcatttaccgctgactaccacgacccggaaaaacgcgccatcgccaatgccattacccttgagttcaccgacggcacacgatttgaagaagtggtggtggagtaccccattggtcatgctcgccgccgtcaggatggtattccgaaactggtcgataaattcaaaatcaatctcgcgcgccagttcccgactcgccaacagcagcgcattctggaggtttctctcgacagagctcgcctggaacagatgccggtcaatgagtatctcgacctgtacgtcatttaagtaaacggcggtaaggcgtaagttcaacaggagagcattatgtcttttagcgaattttatcagcgtagcattaacgaaccggagcagttctgggccgagcaggcccggcgtattgactggcagacgccctttacgcaaacgctcgatcacagcaatccgccgtttgcccgttggttttgtgaaggccgaaccaacttgtgccacaacgccatcgaccgctggctggagaaacagccagaggcgctggcgctgattgccgtctctagcgaaacagaagaagagcgcacctttacctttcgtcagctgcatgacgaagtgaacgcggtggccagtatgttgcgtagtttgggtgtgcagcgcggcgatcgggtgctggtgtatatgccgatgattgccgaagcgcatattactctgctggcctgcgcgcgcattggcgctattcacagcgtggtgtttggtggatttgccagctacagcgtggcggcgcgaattgatgacgctaaaccggtgctgattgtcagcgctgatgccggagcgcgcggtggcaaaatcattccctataaaaaattgctcgacgatgcgataagtcaggcgcagcaccagccacgccatgttttgctggtggatcgcgggctggcgaaaatggcgcgcgtcagcgggcgggatgtcgatttcgcgagcttgcgccatcaacacatcggcgcgcgggtaccggtggcgtggctggaatccaacgaaacctcctgcattctctacacttccggcacgaccggcaaacctaaaggcgtgcagcgtgacgtcggcggatatgcggtggcgctggcgaccagcatggacaccatttttggcggcaaagcgggcagcgtgttcttttgcgcaagcgatatcggctgggtggtggggcatagctatatcgtttacgcgccgctgctggcggggatggcgactatcgtttacgaaggattgccgacctggccggactgcggcgtgtggtggacaatcgtcgagaaatatcaggttagccggatgttcagtgcgccgaccgccattcgcgtgctgaaaaaattccctaccgctgaaattcgcaaacacgatctcagcagcctggaagtgctctatctggctggagaaccgctggacgagccgaccgccagttgggtgagcaatacgctggatgtgccggtcatcgacaactactggcagaccgaatccggctggccgattatggcgattgctcgcggtctggacgacaggccgacgcgtctgggaagccccggtgtgccgatgtatggctataacgtgcagttgcttaatgaagtcaccggcgaaccgtgtggcgtcaacgagaaagggatgctggtggtggaagggccgctgccgccggggtgtattcagaccatctggggcgacgacggccgctttgtgaagacttactggagcctgttttcccgcccggtgtacgccacctttgactggggcatccgtgacgctgacggttatcactttattctcgggcgcactgacgatgtaattaacgttgccgggcatcggctggggacgcgcgagattgaagagagtatctccagccatccgggcgttgccgaagtggcggtggttggggtgaaagatgcgctgaaagggcaggtggcggtggcgtttgtcattccgaaagagagcgacagtctggaagatcgtgatgtggcgcacagccaagagaaggcgattatggcgctggtggacagccagattggcaactttggccgcccggcgcacgtctggtttgtcagccaattgccaaaaacgcgatccggaaaaatgctgcgccgcacgatccaggcgatttgcgaaggacgcgatcctggagatctgacgaccattgatgatcctgcgagcttggatcagatccgccaggcgatggaagagtaagttattgtcggatgcgtcgcgcggtgcatccggcactgtgtgccgatgcctgatgcgacgctgacgcgttttatcatgcctacggacctgaaccgtaggtcggataaggcgctcgcgtcgcatccgacaccatgctcagatgcctgatgcgacgctgacgcgtcttatcaggcctacccactgtttttacaccgataatttttcccccacctttttgcactcattcatataaaaaatatatttccccacgaaaacgattgctttttatcttcagatgaatagaatgcggcggattttttgggtttcaaacagcaaaaagggggaatttcgtgagccaagataacaactttagccaggggccagtcccgcagagcgcgcggaaaggggtattggcattgacgttcgtcatgctgggattaaccttcttttccgccagtatgtggaccggcggcactctcggaaccggtcttagctatcatgatttcttcctcgcagttctcatcggtaatcttctcctcggtatttacactagttttctcggttacattggcgcaaaaaccggcctgaccactcatcttcttgctcgcttcagctttggtgttaaaggcagttggctgcctagtctgctactgggcggaactcaggttggctggtttggcgtcggtgtggcgatgtttgccattccggtgggtaaggcaaccgggctggatattaatttgctgattgccgtttccggtttactgatgaccgtcaccgtcttttttggcattagcgcgctgacggttcttagcgtgattgcggttccggctatcgcctgcctgggcggttattccgtgtggctggctgttaacggcatgggcggcctggacgcattaaaagcggtcgttcccgcacaaccgttagatttcaatgtcgcgctggcgctggttgtggggagttttatcagtgcgggtacgctcaccgctgactttgtccggtttggtcgcaatgccaaactggcggtgctggtggcgatggtggcctttttcctcggcaacagcttgatgtttattttcggtgcagcgggcgctgcggcactgggcatggcggatatctctgatgtgatgattgctcagggcctgctgctgcctgcgattgtggtgctggggctgaatatctggaccaccaacgataacgcactctatgcgagcggtttaggtttcgccaacattaccgggatgagcagcaaaacccttagcgtaatcaacggtattatcggtacggtctgcgcattatggctgtataacaattttgtcggctggttgaccttccttagcgcagctattcctccagtgggtggcgtgatcatcgccgactatctgatgaaccgtcgccgctatgagcactttgcgaccacgcgtatgatgagtgtcaattgggtggcgattctggcggtcgccttggggattgctgcaggccactggttaccgggaattgttccggtcaacgcggtattaggtggcgcgctgagctatctgatccttaacccgattttgaatcgtaaaacgacagcagcaatgacgcatgtggaggctaacagtgtcgaataactaagacgcatgtggaggctaacagtgagcaataacgctttacaaacaattattaacgcccggttaccaggcgaagaggggctgtggcagattcatctgcaggacggaaaaatcagcgccattgatgcgcaatccggcgtgatgcccataactgaaaacagcctggatgccgaacaaggtttagttataccgccgtttgtggagccacatattcacctggacaccacgcaaaccgccggacaaccgaactggaatcagtccggcacgctgtttgaaggcattgaacgctgggccgagcgcaaagcgttattaacccatgacgatgtgaaacaacgcgcatggcaaacgctgaaatggcagattgccaacggcattcagcatgtgcgtacccatgtcgatgttagcgatgcaacgctaactgcgctgaaagcaatgctggaagtgaagcaggaagtcgcgccgtggattgatctgcaaatcgtcgccttccctcaggaagggattttgagctatcccaacggtgaagcgttgctggaagaggcgttacgcttaggggcagatgtagtgggggcgattccgcattttgaatttacccgtgaatacggcgtggagagcctgcataaaaccttcgccctggcgcaaaaatacgaccgtctcatcgacgttcactgtgatgagatcgatgacgagcagagccgctttgtcgaaaccgttgctgccctggcgcaccatgaaggcatgggcgcgcgagtcaccgccagccacaccacggcaatgcactcctataacggggcgtataccagtcgcctgttccgcttgctgaaaatgtccggtattaactttgtcgccaacccgctggtcaatattcatctgcaaggacgtttcgatacgtatccaaaacgtcgcggcatcacgcgcgttaaagagatgctggagtccggcattaacgtctgctttggtcacgatgatgtcttcgatccgtggtatccgctgggaacggcgaatatgctgcaagtgctgcatatggggctgcatgtttgccagttgatgggctacgggcagattaacgatggcctgaatttaatcacccaccacagcgcaaggacgttgaatttgcaggattacggcattgccgccggaaacagcgccaacctgattatcctgccggctgaaaatgggtttgatgcgctgcgccgtcaggttccggtacgttatagcgtacgtggcggcaaggtgattgccagcacacaaccggcacaaaccaccgtatatctggagcagccagaagccatcgattacaaacgttgaacgactgggttacagcgagcttagtttatgccggatgcggcgtgaacgccttatccggcctacgtagagcactgaactcgtaggcctgataagcgtagcgcatcaggcaattccagccgctgatctgtgtcagcggctaccgtgattcattcccgccaacaaccgcgcattcctccaacgccatgtgcaaaaatgccttcgcagcggctgtctgccagctgtagtttatgccggatgcggcgtgaacgccttatccggcctacgtagagcactgaactcgtaggcctgataagcgtagcgcatcaggcaattccagccgcagacctgtgtcagcggttaccgactttcatttccgccaacaaccgcgcatttatccaacgccatgtgcaaaaatgccttcgcggcggctgtctgccagctatttttccgccgcaacaaaaccgccgttctctccagtagtggcggggcaagagaaatagctttaagcccgtcatgttgtgtggcaatcgctgctggtaacaatgtggaaagggaagtgcggcgaatcagctccagaaccgcgctaatactgttcgcctcaatgaccacctgtggatgtagccccgctttctcgcagtagtggtcaatttgctctctggtggcaaattccgcgctgagcaggaccagtttttcatcatgcaagcgactcaacgccacctgttcatggacggccagcggatgatgttgcgccacgactaacgctaaactttctgtcagtaaaggaattgcctccagctccgggctatgcacaggcgcgaaggcaatcccaacgtccaactcgtcgcggcaaagcatatcctcgattttctcctggctcatttcctgtagctggagcgtgatgctgggatagcgcgcatagaaatccgccattaaggggccgataaagtagctcgtaaaggtgggggtgacggcgatacgcaggcttcctcgcgtcagatcggcaacatcatgaatcgcccgtttacccgcccccagttcctgtaacgcccggctggcgtactgtcgccagacttctcctgcatcagtgagacgaatcgttcgcccgctacggtcaaacagcggcacgcctaaactctcctctaactggcgaatctgctgggaaagcgcaggttgggagacgtgcaacgcactggcggcacgggtgaagctgccatgttcagccacggcaagaaaataattgatatgtcgagagagcattcgcaacctataagtaaatccaatggaactcatcataaatgagacttttaccttatgacaatcggcgagtagtctgcctctcattccagagacagacagaggttaacggtgaaagagattattgatggattccttaaattccagcgcgaggcatttccgaagcgggaagccttgtttaaacagctggcgacacagcaaagcccgcgcacactttttatctcctgctccgacagccgtctggtccctgagctggtgacgcaacgtgagcctggcgatctgttcgttattcgcaacgcgggcaatatcgtcccttcctacgggccggaacccggtggcgtttctgctagcgtggagtatgccgtcgctgcgcttcgggtatctgacattgtgatttgtggtcattccaactgtggcgcgatgaccgccattgccagctgtcagtgcatggaccatatgcctgccgtctcccactggctgcgttatgccgatagtgcccgcgtcgttaatgaggcgcgcccgcattccgatttaccgagtaaagctgcggcgatggtacgtgaaaacgtcattgctcagttggctaatttgcaaactcatccaagcgtgcgcctggcgctcgaagaggggcggatcgccctgcacggctgggtctacgacattgaaagcggcagcatcgcagcttttgacggcgcaacccgccagtttgtgccactggccgctaatcctcgcgtttgtgccataccgctacgccaaccgaccgcagcgtaaccttatttttaaaccatcaggagttccaccatgattcagagtcaaattaaccgcaatattcgtcttgatcttgccgatgccattttgctcagcaaagctaaaaaagatctcagttttgccgagattgccgacggcaccggtctggcagaagcctttgtaaccgcggctttgctgggtcagcaggcgcttcctgccgacgccgcccgcctggtcggggcgaagctggatctcgacgaagactccattctactgttgcagatgattccactgcgtggctgcattgatgaccgtattccaactgacccaacgatgtatcgtttctatgaaatgttgcaggtgtacggtacaaccctgaaagcgttggttcatgagaaatttggcgatggcattattagcgcgattaacttcaaactcgacgttaagaaagtggcggacccggaaggtggcgaacgtgcggtcatcaccttagatggtaaacatctgccgaccaaaccgttctgacagccatgcgcaaccatcaaaagacgttcacgatgctgctggtactggtgctgattggtcttaatatgcgaccactgctcacctccgtcgggccactgctaccgcaattgcgccaggcgagcggaatgagctttagcgtggctgccctgttgaccgctctgccggtggttaccatgggcgggctggcgctggccggaagctggcttcatcagcatgtcagcgaacgtcgcagtgtcgccatcagtctgttgctgattgccgtcggtgcattgatgcgtgagctttacccgcaaagtgcgctgctgcttagcagcgcactgcttggtggggtggggatcggcatcattcaggcggtgatgcctagcgtgattaaacggcggtttcagcagcgcacgccactggtgatggggctgtggtccgcggctctgatgggcggcggtgggcttggtgccgccataacgccctggttagttcaacatagcgaaacctggtatcaaacactcgcctggtgggcgctgcctgccgttgttgcgctctttgcctggtggtggcaaagcgcccgcgaggtcgcctcttcccacaagacaacaaccactccggttcgcgtggtattcactccccgcgcgtggacgctgggtgtttacttcggtctgattaacggcggttacgccagcctgattgcctggttacccgctttctatattgagattggtgccagcgcgcagtacagcggttccttactggcattgatgacgcttgggcaagccgcaggagctttgctgatgcctgctatggctcgccatcaggatcggcgcaaactgttaatgctggcgctggtgttacaactggtggggttctgcggctttatctggctgccgatgcaattgccggtattgtgggcgatggtgtgtgggttaggtctgggcggcgcgtttccgctctgtttgctgctggcgctcgatcactctgtgcaaccggctattgctggcaagctggtggcgtttatgcagggaatcggttttatcatcgccgggcttgccccgtggttttctggcgtgctgcgtagtatcagcggcaattacctgatggactgggcatttcatgcgctgtgcgtcgttgggctgatgatcataaccctgcgttttgcaccagtacgttttccgcagctgtgggtcaaagaggcatgatgcgacgcttgttcctgcgctttgttcatgccggatgcggctaatgtagatcgctgaacttgtaggcctgataagcgcagcgtatcaggcaatttttataatttaaacactgctttcaactttataatctttgaaataatagtgcttatcccggtcgtttatttcgcgaataacccgacaaggaacgccagccgccacgacgtttggtggaatgtcttttgtgacgatactacccgcgccaataacagaattatccccgatggtgacgcctggattaataaccacatgacttccgatccagacgttattgccaatcgttatcggaaaagagtacatctcgccgttttttctcaattcatggtgtacagggtgtcccgtaacggaaagagtaacgttgggtgcaatcagtacgttatcaccgattgttaccgtgtagtcatcgacaatggttaaattgaaatttgcataaaaattgcggcctatatggatgttggaaccgtaagagaaatagacaggcggttctacccaggcgttttcccctaccgtggcaaacatttctttaatcaggctttctcttttttcaacttcacttggatggctgtgattaaactcatacattaacgttttcccacgaagtcttttttccggtaagccttcgcacatatcggtaaatagcttgcctgctcttattctttcggtcattggcatgttcaatgcgatcactccgttatgatatgttggtcggataaggcgctcgcgccgcatccgacattgattgcttaagcgacttcattcacctgacgacgcagcagggaaagcgggccggggccgctaagcgtgaacacggaaattaaggtgaagcccagcgccaccagacccagcaccagataagcgccctggaaaccgatgctttcatacatattgcccgccagtacagacataaaaatcatcgccagttgcttaaagaagcagaaacagaccagataaatcgtcgcactaaaacgcacttcaaactggctggtaatatatttaaagcagcccaccagcaggaacggtacttcaaacatatgcagcgttttcagaataaccacttccagcgcactggtggcgaagctactgccaataatacgtacagacataatagtgccagccagcagcagggcgtttttcccaccgatgcgattaatgatcagtggcgcaaagaacataatgctggcgttaagtaattcgcccattgtcgttacgtagccaaatacccgcgtaccctgttcaccggtagcaaagaagctagtaaagaaattagcaaactgttggtcaaaaacatcgtaggtgcaggaaacgccaataacatacagactcaaaaaccacagttttggctgtctgaacagttccagtgccagcttaaggctaaatgcgctatggttggcacctaccgcattggcaaccgtggcagaagagggcgcatccgttttggcgaaaaagagtaaaacggcgaggatgagtgcacagccagagcccagccagaaaacaaactgattattgatggtgaacatgatgccgacaatgctggcacacagcgcccagccaacacagccaaacatccgcgcgcgaccaaattcgaaattactgcgacggctgactttctcaataaatgcctctactgctggcgcaccggcgttaaaacaaaagcctagataaataccaccaacaatgcttcctactaaaatgttgtattgtaacagtggcccgaagataaaaataaagaacggcgcaaacatcactaacatgccggtaataatccacagcaggtatttgcgcagcccgagtttgtcagaaagcagaccaaacagcggttggaataataggctgaacagagaaatagcggcaaaaataatacccgtatcacttttgctgatatggttgatgtcatgtagccaaatcgggaaaaacgggaagtaggctcccatgataaaaaagtaaaagaaaaagaataaaccgaacatccaaaagtttgtgttttttaaatagtacataatggatttccttacgcgaaatacgggcagacatggcctgcccggttattattatttttgacaccagaccaactggtaatggtagcgaccggcgctcagctggaattccgcgcttacactcgggctccaggagtcgtcgccaccaatccccatatggaaaccgtcgatattcagccatgtgccttcttccgcgtgcagcagatggcgatggctggtttccatcagttgctgttgactgtagcggctgatgttgaactggaagtcgccgcgccactggtgtgggccataattcaattcgcgcgtcccgcagcgcagaccgttttcgctcgggaagacgtacggggtatacatgtcactcaatggcagatcccagcggtcaaaacaggcggcagtaaggcggtcgggatagttttcttgcggccctaatccgagccagtttacccgctctgctacctgcgccagctggcagttcaggccaatccgcgccggatgcggtgtatcgctcgccacttcaacatcaacggtaatcgccatttgaccactaccatcaatccggtaggttttccggctgataaataaggttttcccctgatgctgccacgcgtgagcggtcgtaatcagcaccgcatcagcaagtgtatctgccgtgcactgcaacaacgctgcttcggcctggtaatggcccgccgccttccagcgttcgacccaggcgttagggtcaatgcgggtcgcttcacttacgccaatgtcgttatccagcggtgcacgggtgaactgatcgcgcagcggcgtcagcagttgttttttatcgccaatccacatctgactaagaaagccactctggcggttaaattgccaacgcttattacccagctcgatgcaaaaatccatttcgctggtggtcagatgcgggatggcgtgggacgcggcggggagcgtcacactgaggttttccgccagacgccactgctgccaggcgctgatgtgcccggcttcactccatgcggtcgcgttcggttgcactacgcgtactgtgagccagagttgcccggcgctctccggctgcggtagttcaggcagttcaatcaactgtttaccttgtggagcgacatccagaggcacttcaccgcttgccagcggcttaccatccagcgccaccatccagtgcaggagctcgttatcgctatgacggaacaggtattcgctggtcacttcgatggtttgcccggataaacggaactggaaaaactgctgctggtgttttgcttccgtcagcgctggatgcggcgtgcggtcggcaaagaccagaccgttcatacagaactggcgatcgttcggcgtatcgccaaaatcaccgccgtaagcgctccacgggttgccgttttcatcatatttaatcaggctctgatccacccagtcccagacgaagccgccctgtaaacggggatactgacgaaacgcctgccagtatttagcgaaaccgccaagactgttacccatcgcgtgggcgtattcgcaaaggatcagcgggcgcgtctctccaggtaggctaagccattttttgatggaccatttcggcacagccgggaagggctggtcttcatccacgcgcgcgtacatcgggcaaataatatcggtggccgtggtgtcggctccgccgccttcatactgcaccgggcgggaaggatcgacagatttgatccagcgatacagcgcgtcgtgattagcgccgtggccactttcattccccaggctccagatgatcacactcgggtgattacgatcgcgctgcaccattcgcgttacgcgttcgctcatcgccggtagccagcgcggatcatcggtcagacgattcattggcaccatgccgtgggtttcaatattggcttcatccaccacatacaggccgtagcggtcgcacagcgtgtaccacagcggatggttcggataatggctacagcgcacggcgttaaagttgttctgcttcatcagcaggatatcctgcaccatcgtctgctcatccatgacctgaccatgcagaggatgatgctcgtgacggttaacgcctcgaatcagcaacggcttgccgttcagcagcagcagaccattttcaatccgcacctcgcggaaaccgacatcgcaggcttctgcttcaatcagcgtgccgtcggcggtgtgcagttcaaccaccgcacgatagagattcgggatttcggcgctccacagtttcgggttttcgacgttcagacgtagtgtgacgcgatcggcataaccaccacgctcatcgataatttcaccgccgaaaggcgcggtgccgctggcgacctgcgtttcaccctgccataaagaaactgttacccgtaggtagtcacgcaactcgccgcacatctgaacttcagcctccagtacagcgcggctgaaatcatcattaaagcgagtggcaacatggaaatcgctgatttgtgtagtcggtttatgcagcaagctgacgtcacggaaaatgccgctcatccgccacatatcctgatcttccagataactgccgtcactccagcgcagcaccatcaccgcgaggcggttttctccggcgcgtaaaaatgcgctcaggtcaaattcagacggcaaacgactgtcctggccgtaaccgacccagcgcccgttgcaccacagatgaaacgcgctgttaacgccatcaaaaataattcgcgtctggccttcctgtagccagctttcatcaacattaaatgtgaggctgtaacaacccgtcggattctccgtgggaacaaacggcggattgaccgtaatgggataggtcacgttggtgtagatgggcgcatcgtaaccgtgcatctgccagttactggggacgacgacagtatcggcctcaggaagatcgcactccagccagctttccggcaccgcttctggtgccggaaaccaggcaaagcgccattcgccattcaggctgcgcaactgttgggaagggcgatcggtgcgggcctcttcgctattacgccagctggcgaaagggggatgtgctgcaaggcgattaagttgggtaacgccagggttttcccagtcacgacgttgtaaaacgacggccagactatccgtaatcatggtcatagctgtttcctgtgtgaaattgttatccgctcacaattccacacaacatacgagccggaagcataaagtgtaaagcctggggtgcctaatgagtgagctaactcacattaattgcgttgcgctcactgcccgctttccagtcgggaaacctgtcgtgccagctgcattaaactatcggccaacgcgcggggagaggcggtttgcgtattgggcgccagggtggtttttcttttcaccagactgacgggcaacagctgattgcccttcaccgcctggccctgagagagttgcagcaagcggtccacgctggtttgccccagcaggcgaaaatcctgtttgatggtggttaacggcgggatataacaactgctgtcttcggtatcgtcgtatcccactacgctgatatccgcaccaacgcgcagcccggactcggtaatggcgcgcattgcgcccagcgccatctgatcgttggcaaccagcatcgcagtgggaacgatgccctcattcagcatttgcatggtttgttgaaaaccggacatggcactccagtcgccttcccgttccgctatcggctgaatttgattgcgagtgagatatttatgccagccagccagacgcagacgcgcgctgacagaacttaatgggcccgctaacagcgcgatttgctggtgacccaatgcgaccagatgctccacgcccagtcgcgtaccgtcttcatgggagaaaataatactgttgatgggtgtctggtcagagacatcaagaaataacgccggaacattagtgcaggcagcttccacagcaatggcatcctggtcatccagcggatagttaatgatcagcccactgacgcgttgcgcgagaagattgtgcaccgccgctttacaggcttcgacgccgcttcgttctaccatgctcaccaccacgctggcacccagttgatcggcgcgagatttaatcgccgcgacaatttggctcggcgcgtgcagggccagactggaggtggcaacgccaatcagcaagctctgtttgcccgccagttgttgtgccacgcggttgggaatgtaattcagctccgccatcgccgcttccactttttcccgcgttttcgcagaaacgtggctggcctggttcaccacgcgggaaacggtctgataagagacaccggcatactctgcgacatcgtataacgttactggtttcacattcaccaccctgaattgactctcttccgggcgctatcatgccataccgcgaaaggttttgcgccattcgatggtgtcaacgtaaatgcatgccgcttcgccttccggccaccagaatagcctggctttcaaccccttcttcgatctgttttgctacccgttgtagcgccggaagatgcttttccgctgcctgttcaatggtcattgcgctcgccatatacaccagattcagacagccaatcacccgttgttcactgcgcagcggtacggcgatagaggcgatcttctcctcctgatcccagccgcggtagttctgtccgtaaccctctttgcgcgcgcgcgccagaatggcttccagctttaacggttcccgtgccagttgatagtcatcaccggggcgggaggctaacatttcgattaattccttgcggtcttgttccgggcaaaaggccagccaggtcaggccgctggcggttttcagaagcggcaaacgtcgcccgaccattgcccggtgaaaggataagcggctgaaacggtgagtggtttcgcgtaccaccattgcatcaacatccagcgtggacacatctgtcggccataccacttcgcgcaacagatcgcccagcagtggggccgccagtgcagaaatccactgttcgtcacgaaatccttcgcttaattgccgcactttgatggtcagtcgaaaactatcatcggaggggctacggcggacatatccctcttcctgcagcgtctccagcagtcgccgcacagtggtgcgatgcaggccgctgagttccgccagcagcccgacgctggcaccgccatcaagtttatttaacatatttaataacattagaccgcgggttaagccgcgcacggttttgtattccgtctgctcattgttctgcatattaatactcatttctatagttaaaacaacgtggtgcacctggtgcacattcgggcatgttttgattgtagcgctaaacacccttcctatactgagcgcacaataaaaaatcatttacatgtttttaacaaaataagttgcgctgtactgtgcgcgcaacgacattttgtccgagtcgtgaggtactgaaatggcaatacaacaccctgacatccagcctgctgttaaccatagcgttcaggtggcgatcgctggtgccggcccggttgggctgatgatggcgaactatctcggccagatgggcattgacgtgctggtggtggagaaactcgataagttgatcgactacccgcgtgcgattggtattgatgacgaggcgctgcgcaccatgcagagcgtcggcctggtcgatgatgttctgccgcacactacgccgtggcacgcgatgcgttttctcaccccgaaaggccgctgttttgctgatattcagccaatgaccgatgaatttggctggccgcgccgtaacgcctttattcagccgcaggtcgatgcggtgatgctggaaggggtgagccgttttccgaatgtgcgctgcttgttttcccgcgagctggaggccttcagtcagcaagatgacgaagtgaccttgcacctgaaaacggcagaagggcagcgggaaatagtcaaagcccagtggctggtagcctgtgacggtggagcaagttttgtccgtcgcactctgaatgtgccgtttgaaggtaaaactgcgccaaatcagtggattgtggtagatatcgccaacgatccgttaagtacgccgcatatctatttgtgttgcgatccggtgcgcccgtatgtttctgccgcgctgcctcatgcggtacgtcgctttgaatttatggtgatgccgggagaaaccgaagagcagctgcgtgagccgcaaaatatgcgcaagctgttaagcaaagtgctgcctaatccggacaatgttgaattgattcgccagcgtgtctacacccacaacgcgcgactggcgcaacgtttccgtattgatcgcgtactgctggcgggcgatgccgcgcacatcatgccggtatggcaggggcagggctataacagtggtatgcgcgacgcctttaacctcgcatggaaactggcgttggttatccaggggaaagcccgcgatgcgctgctcgatacctatcaacaagaacgtcgcgatcacgccaaagcgatgattgacctgtccgtgacggcgggcaacgtgctggctccgccgaaacgctggcagggtacgttacgtgacggcgtttcctggctgttgaattatctgccgccagtaaaacgctacttcctcgaaatgcgcttcaagccgatgccgcaatattacggcggtgcgctgatgcgtgagggcgaagcgaagcactctccggtcggcaagatgtttattcagccgaaagtcacgctggaaaacggcgacgtgacgctgctcgataacgcgatcggcgcgaacttcgcggtaattggctggggatgcaatccactgtgggggatgagcgacgagcaaatccagcagtggcgcgcgttgggcacacgcttcattcaggtggtgccggaagtgcaaattcataccgcacaggataaccacgacggcgtactacgcgtgggcgatacgcaaggtcgcctgcgtagctggttcgcgcaacacaatgctagcctggtggtgatgcgcccggatcgctttgttgccgccaccgccattccgcaaaccctgggcaagaccctgaataaactggcgagcgtgatgacgctgacccgccctgatgccgacgttcctgtcgaaaaggtagcctgatatgcacgcttatcttcactgtctttcccacagcccgctggtggggtatgtcgacccggcgcaagaggtgctcgatgaggtcaatggcgtgattgccagcgcccgcgagcgtattgcggcattctcccctgaactggtggtgctgtttgcgccagatcactacaacggctttttctatgacgtgatgccaccgttctgtttaggcgttggagcgacggcaattggtgatttcggcagtgcggcaggagagctgcccgtgcctgtggagctggcggaggcctgtgcgcatgccgtcatgaagagcgggatcgatcttgccgtttcttactgtatgcaggtggaccacgggttcgcccagccgctggagttcctgctcggtgggctggataaggtgccagttctgcctgtgttcatcaacggtgtcgccacgccgctgcccggtttccagcgtacccgcatgttgggtgaagccattggacgtttcaccagcactctcaataaacgcgtgctgttcctgggttccggtgggctttcccatcagccgccggtgcccgaactggcgaaagccgatgcccatatgcgcgaccgtctgttggggagcgggaaagatttacccgccagtgagcgcgaattgcgtcagcaacgggtgattagcgccgctgagaagtttgttgaggatcagagaacgctgcatccgctcaacccgatttgggataaccagttcatgactttgctggagcagggacgcatacaggaactggatgccgtcagtaacgaagagctttccgccattgccggaaagagcacacatgaaatcaaaacctgggtcgccgcttttgccgctatttctgcgtttggcaactggcgtagcgaagggcgttattaccgcccaatcccggagtggattgccggatttggcagcttaagcgccagaacagagaactgaatatgcaggagaagatgatgagttatcagccacaaaccgaagccgccaccagccgttttctgaatgtagaagaagcgggtaaaacgctgcgcatccattttaatgactgcggacaaggcgacgaaaccgttgtcctgctgcatggttccggcccgggtgctactggctgggcgaacttcagccgcaatatcgatccgctggtagaggcgggctatcgggtgatcctgctggattgtccgggttggggcaagagcgatagcgtcgttaatagtggtagccgaagcgatcttaatgcacgaatcctgaaaagcgtggtggatcaactggatatcgccaaaatccacctgctgggcaacagcatggggggccatagttctgtggcgttcacccttaaatggccggagcgcgtcggcaaactggtgctgatgggcggcggtacgggcggcatgagtttgtttacgccgatgccaaccgaaggtattaagcgactgaatcagctttatcgtcagccgactatcgaaaacctgaagctgatgatggatatcttcgtttttgataccagcgatttgaccgacgccctgtttgaagcgcgcctgaataatatgctgagccgccgcgatcacctggaaaacttcgttaagagcctggaagctaatccgaaacagttcccggattttggcccacgtctggcggaaatcaaagcgcaaaccctgattgtctgggggcgcaacgaccgctttgtgccgatggatgcgggtctgcgtctgctgtccggcattgccggttctgaactgcatatcttccgcgactgtggtcactgggcgcagtgggaacatgccgacgctttcaatcaactggtgctgaatttcctcgcacgcccttaaggaatggtcatgacgaagcatactcttgagcaactggcggcggatttacgccgcgccgcagagcagggcgaagcgattgcaccgctgcgcgatctgattggtatcgataacgctgaagcggcttacgccattcagcacataaatgtgcaacatgacgttgcgcaggggcgtcgcgtggtagggcgtaaagtgggcctgacacatccgaaagtgcaacaacaactgggcgttgatcaaccggattttgggacgttatttgccgacatgtgttatggcgataacgaaatcattcctttttcccgtgttctgcaaccccgcattgaagcggagatcgcactggtgttgaaccgcgatttgcccgcaaccgatatcaccttcgacgaattgtataacgccattgaatgggtacttccggcgctggaagtggtggggagccgcattcgcgactggagcattcagtttgtcgataccgtggcagataacgcctcctgtggggtgtatgtcatcggcggtccggcgcaacgtccggcggggttagacctgaaaaactgcgccatgaagatgacgcgtaataacgaagaggtttctagcgggcgcggcagcgaatgcctgggacatccgcttaatgcggccgtctggctggcacgcaaaatggccagtctgggtgaaccgctgcgcaccggagatatcattcttaccggggcattaggtccgatggtggcggtgaatgcgggcgatcgttttgaagcccatattgaaggcataggtagtgttgctgcgacatttagtagcgcagccccaaaaggaagtctgagttgagctaagccccaaaaggaagtctgtcatgagtaagcgtaaagtcgccattatcggttctggcaacattggtaccgatctgatgattaaaattttgcgtcacggtcagcatctggagatggcggtgatggttggcattgatcctcagtccgacggtctggcgcgcgccagacgtatgggcgtcgccaccacccatgaaggggtgatcggactgatgaacatgcctgaatttgctgatatcgacattgtatttgatgcgaccagcgccggtgctcatgtgaaaaacgatgccgctttacgcgaagcgaagccggatattcgcttaattgacctgacgcctgctgccatcggcccttactgcgtgccggtggttaacctcgaggcgaacgtcgatcaactgaacgtcaacatggtcacctgcggcggccaggccaccattccaatggtggcggcagttagtcgcgtggcgcgtgttcattacgccgaaattatcgcttctatcgccagtaaatctgccggacctggcacgcgtgccaatatcgatgaatttacggaaaccacttcccgagccattgaagtggtgggcggcgcggcaaaagggaaggcgattattgtgcttaacccagcagagccaccgttgatgatgcgtgacacggtgtatgtattgagcgacgaagctagtcaagatgatatcgaagccagtatcaatgaaatggctgaggcggtgcaggcttacgtaccgggttatcgcctgaaacagcgcgtgcagtttgaagttatcccgcaggataaaccggtcaatttaccgggcgtggggcaattctccggactgaaaacagcggtctggctggaagtcgaaggcgcagcgcattatctgcctgcctatgcgggcaacctcgacattatgacttccagtgcgctggcgacagcggaaaaaatggcccagagtctggcgcgcaaggcaggagaagcggcatgaacggtaaaaaactttatatcagcgacgtcacattgcgtgacggtatgcacgccattcgtcatcagtatagcctggaaaacgttcgccagattgccaaagcactggacgatgcccgcgtggatagcattgaagtggcccacggcgacggtttgcaaggttccagctttaactatggtttcggcgcacatagcgaccttgaatggattgaagcggcggcggatgtggtgaagcacgccaaaatcgcgacgttgttgctgccaggaatcggcactattcacgatctgaaaaatgcctggcaggctggcgcgcgggtggttcgtgtggcaacgcactgtaccgaagctgatgtttccgcccagcatattcagtatgcccgcgagctcggaatggacaccgttggttttctgatgatgagccatatgaccacgccggagaatctcgccaagcaggcaaagctgatggaaggctacggtgcgacctgtatttatgtggtggattctggcggtgcgatgaacatgagcgatatccgtgaccgtttccgcgccctgaaagcagagctgaaaccagaaacgcaaactggcatgcacgctcaccataacctgagtcttggcgtggcgaactctatcgcggcggtggaagagggctgcgaccgaatcgacgccagcctcgcgggaatgggcgcgggcgcaggtaacgcaccgctggaagtgtttattgccgccgcggataaactgggctggcagcatgggaccgatctctatgcgttaatggatgccgccgacgacctggtgcgtccgttgcaggatcgaccggtacgagtcgatcgcgaaacgctggcgctgggatacgctggtgtttacagcagcttcctgcgtcactgtgaaacggcggcggcgcgttatggcttaagtgcggtggatattctcgttgagctgggcaaacgccggatggttggcggccaggaggatatgatcgttgacgtggcgctggatctgcgcaacaacaaataatgatgactgccgagaacgtgcattttgtatgcccatcccagcacgactgccggatgcggcgtgaacgccttatccggcctacggatggcgtgagaatttgtaggtctgataagacgcgttagcgtcgcatcaggcatctgcgcacgactgccggatgcggcgtgaacgccttatccggcctacggatggcgcgggaatttgtaggcctgataagacgcgttagcgtcgcatcaggcatctgcgcacgactgccggatgcggcgtgaacgccttatccggcctacgggtggcgcgagaatttgtaggcctgataagacgcgttagcgtcgcatcaggcatctgcgcacgactgccggatgcggcgtaaacgccttatccggcctacggatggcgcgggaatttgtaggcctgataagacgcgttagcgtcgcatcaggcatctgcacacgactgccggatgcgataaacgtcttgtccggcctacatttcgcccgtaggcagtcattaaatagttctgattacgcggctggcaatgtatcagtcgcgattcacctgcactcgcaacgaggttcatcttatgagcactcgtacccctagtagttctagttcccgcctgatgctgaccatcgggctttgttttttggtcgctctgatggaagggctggatcttcaggcggctggcattgcggcgggtggcatcgcccaggctttcgcactcgataaaatgcaaatgggctggatatttagcgccggaatactcggtttgctacccggcgcgttggttggcggaatgctggcggaccgttatggtcgcaagcgcattttgattggcagtgttgcgctgtttggtttgttcagtctggcaacggcgattgcctgggatttccccagtctggtctttgcgcggctgatgaccggtgtcgggctgggggcggcgttgccgaatcttatcgccctgacgtctgaagccgcgggtccacgttttcgtgggacggcagtgagcctgatgtattgcggtgttcccattggcgcggcgctggcggcgacactgggtttcgcgggggcaaacttagcatggcaaacggtgttttgggtaggtggtgtggtgccgttgattctggtgccgctattaatgcgctggctgccggagagcgcggttttcgctggcgaaaaacagtctgcgccaccactgcgtgccttatttgcgccagaaacggcaaccgcgacgctgctgctgtggttgtgttatttcttcactctgctggtggtctacatgttgatcaactggctaccgctacttttggtggagcaaggattccagccaagccaggcggcaggggtgatgtttgccctgcaaatgggggcggcaagcgggacgttaatgttgggcgcattgatggataagctgcgtccagtaaccatgagcctactgatttatagcggcatgttagctagcctgctggcgcttggaacggtgagcagttttaacggtatgttgctggcgggatttgtcgcggggttgtttgcgacaggtgggcaaagcgttttgtatgccctggcaccgttgttttacagtagccagatccgcgcaacaggtgtgggaacagccgtggcggtagggcgtctgggggctatgagcggtccgttactggccgggaaaatgctggcattaggcactggcacggtcggcgtaatggccgcttctgcaccgggtattcttgttgctgggttggcggtgtttattttgatgagccggagaagtcgaatacagccgtgcgccgatgcctgacgtgccttattaggcaggggcgaaagggacttcaccccaatacacctacggcgtttacaggtatactcgctaaaaattattcagcgggtttggaaacaaagatggcaaaacttaccttacaagagcagttgctcaaagcaggattagtcaccagcaaaaaagcggcgaaggtggagagaacggcgaaaaaaagccgcgttcaggcgcgtgaagctcgggcggcggtagaagaaaataaaaaggcacagcttgagcgtgataaacagcttagcgaacagcaaaaacaagcggcgttggcgaaagaatataaagctcaggtgaagcagcttattgaaatgaaccgaatcaccattgccaatggcgatattggttttaacttcactgacggcaatctgattaagaagatttttgtcgataagctcacacaggcgcagttgattaatggtcgtctggcgattgcccgcttgttggtcgataacaatagcgaaggtgaatacgccattattcccgccagcgttgccgataaaattgctcagcgcgatgccagcagtatagcgttgcacagcgcgctcagcgccgaagagcaggatgaagacgacccgtatgccgacttcaaagtgcctgatgatttgatgtggtaaacatagataagtcgtgcgcagatgcctgatgcgacgctatgcgcgtcttatcaggcctacggtttatgggcgaagtgtagaccggataaggcgttcacgccgcatccggcagtcgtgcgccatgcctgatgcgacgctttgcgcgtcttatcaggcctacggcttacgggcgaagtgtaggccggataaggcgttcacgccgcatccggcagtcgtgctattatcaacgcatattcagtttattggcgtggtaggcaatatgctcgccaataaaactggagacaaaataatagctgtgatcataaccctcgtgataacggattaacgtcttgatattcatctcctggcagatcttttcaagatttggagtccgcagctgttctgcgtaaaaatcatcactcaacccctgatcaaccatgatttccgcaacgcgttgaccttgactaataagactcaccgggtcgtaatccaaccaggcatctttattttcagcaagatatgcagcaaaggcttgctgtccccacggcacttggcttggggagacaatggggctaaacgcgctgacgctgacatattcatctgggttacgtaacgccagcaccagcgcgcccagcccgcccatagaatgaccagagatagactttttggccgttgccggaaaatgatgcatcactaaatccggcagctcgttgcggatatagtcatacattttgtaatgttcattccacggcgcttgcgtcgcgttcaggtaaaacccggcaccttgcccgagatcgtaacggtcagcatctgcgacatgactgcctcgcggactggtgtccggcgcaacaacaataatgttgtgctcagccgcgtaacgctgcatcccgcttttagtaatgaaattctgctcgttgcaggtcaggccactaagccagtacagcaccggcaatttttcattcgcggcttttggtgggagatagacgccgacattcatttcacatttcagactttgggaataatgccgatacatattttgccagccgccaaagctgacatgtttttcaatgagttccatcagtcattatctcagggttaatcccccggacggctgcccggggagagtattaagaacccccgcctgaagtggacggggtaaacctgcgggaaatcagtaacgaattacggttcgaatggatttgccttcatgcatcaggtcgaaggcgtcattaatttcatccaggctcatggtatgcgtgacaaacggttccagatcgatatcacctttcatcgcatcttcaaccatgcccggtaactgggaacgacctttcacgccgccaaacgcggaacctttccatacgcgaccagtgaccaactggaatggacgggtggagatttcctgaccggcaaccgcgaccccgatgatcacgctctgaccccagccgcggtgcgcactttccagcgccgcacgcatcacgttgacgttaccgatgcattcaaaggtatggtcgataccccatttgttgatatccaacaggacatcttttatcggtttgtcgtagtcattcgggttaatgcagtcggtagcaccgaagcgacgcgccagatcgaatttcttcgggttggtatcgatagcgataatccgacccgctttcgcctgacgcgcgccctgaaccactgccagaccaatcgcgccaagaccaaacacggcaacagaatcacctggctggactttagctgtgttgtgtaccgcgccaataccggtggtcacgccacagcccagcaggcagacgtgttcatggtttgcttctggattaatttttgccagagacacttccgcgactacggtgtattcactgaatgtagagcaccccatgtagtgataaagcggctgcccgttgtaagaaaaacgggtggtgccgtctggcatcaggcctttaccctgggtttcgcgaaccgcaacacagaggttagttttgccagaacgacagaactcacactcgccgcactccgcggtgtaaagcgggatcacatggtcgccaggtttgacgctggttacgccttcaccgacttcaaccacaacgccggccccttcgtgaccgagaaccaccgggaatacaccttccgggtcatcgccggagagggtaaatgcgtcggtatggcaaacgccggtatgggtgactttaattagcacttcaccttttttcggtggtgcaacgtcaatttcaacgatttccagcggtttaccgggagcaaatgcaacggcagcacgacttttcatctctcgctcttcctcaatatggtaatagattcagttatttaagataggcacgaaccagttcaatagtgtcgtcaacggattggctgacttcgcggctgtagcagtcatttcggtcaaacgtttcccggatatggctttcaagcacttctgccatcagcccattagccgcgccccgaacggcagcgatctgttggagtatggcacggcattcggcatcaccctccaggctccgttccagagcatcaatctgcccccgaatacgacgaactcgagtaaggacctttttcttctcttccggagtactgggcatttcgcacctcatcatctgcatgcaatatactataggggggtattctatatgtcaatgcatacccccctatagtatataacactggagaataaaatttatccggtgaatgtggtcggaaaacaaagaggaaaggggggggctaatcggcagggaaggccgccccggatagcgggcggcagaaggaatcagaatttccaggtcagacgggctgcaagttgcagaccgttacgagatggacggtcccctcgcccccttggggagagggttagggtgagggggcgttcaccgtactttcaacaggttaactccccctttctgagaggaaacaaaattaacgcagaatcttcttctcagccaaatccagcgcaaagtagctgaaaatcagatccgcacccgcacgcttaatgctacctaagctttcgagcacgactttctcttcatctatagcacccgccagcgcggcgaacttaatcatcgcatactcaccgctcacctgatacgcgccaatcggcaattcagtacgttcacgcagctcacgcacgatgtcgaggtacgctccagcaggtttaaccatcaggcagtctgcgccctgggcttcatccagcagactttcacgaatcgcctcacgacggttcattgggttcatctgatagcttttgcggtcgccttttaatgcgcttccggcagcttcacggaacgggccataaaaggaggaggcgaacttggtgctatagctcataatcgccgtatctttaaatcccgcagcgtccagcgcctgacgaatcgcctgtacctggccgtccatcgcggcggaaggggcgatgaagtctgcacctgcagcagctgcaaccacggcttgcttgcctaaattttccagagtcgcgtcgttgtcgacgccatgctcgcacagcacaccgcagtgaccgtgagaagtgtattcacagaagcaggtgtcactcataacgatcatttctggcacggtctgcttgcagatgcggctcatacgcgccaccagtccatcttcccgccaggcatcgctgccggtttcatcggtatggtgagagatgccaaaagtcatcacggaacgaataccggcgttggcgatgcgttcaatttcgcgtgccagatgtttctctggaatgcgcatcacgcctggcatggcttcaacggctttgtagtcgtcaatttcttcttcaacaaagatcggcaacaccaggtcgttaaggctaagtgttgtctcttcaaacatagcgcgcagcgcaggagatttgcgcaggcgacgagggcgttggattaagtctgtcatggtctgcctgatgtttgtggaatcgaggggcatagtatacctgaagcagggtagggatgttttacgaaagttgtcgcgatgttgacaagaagagaatggaagagaggccaggacatctttttaatagaaacagcaataattttatattcactgaaaatatttttaatcttgaatattatcgggcgttaaaatattacattgtggttttcaatgcgttatccgcagcgtgacgctccagcgccagttcaatcaaacgtgtgatcagatcggtgtaacccagaccgctggcttgccacagcttcggatacatactgatattagtgaagccaggcagggtgttgatctcgttgatcaccacttcgttctctggggttaaaaacacgtctacacgcgccatgcctgcgcatcccaacgtttgataagcctgaacggcaatcgcccggatcttatcgttgatttctggcgcaatggctgccggaactaccactttcgcgccatcttcgtcaatgtacttggtgtcgtaggcatagaaatcgctggtgagtacgatctctccacaggtgctggcttgcggattgtcgttgcccagaactgcgcattcgatctcacgacctttgatcccttgctcaacgatcactttatgatcgaactcgaacgccagatcgacggcaattgcgtactgttcttcactggttactttgctgacaccaacagaagagccctgattagccggttttacaaacagtggtaaccccagtttagactccacttcggcaaaactaatgttgtgacgattggcgcgcgtcagggtaataaatggcgcaatgttcagcccggcatcgcgtagcagacgtttggtgacatctttgtccatacaggctgcactagccagaacatcagaacctacaaacggtaaattggcgacccgcagcattccctgcaaggaaccatcttcgcccagcgtaccgtggacaatcgggaaaatgacatccaccgtcggcaacggctgaccgttttgcgcgtcgataagctgatgctcatgtttacctggcacctgcgcaaggctggtcgcgctagggcgcaacgcaatatgggcaggatcgtctgcatttagcagataattgctggcatcgctgacgtgccattgcccttgtttatcaatgcccagcagcacaacgtcgaagcgacttttatcaatggcatcgacaatgttttttgcgctttgcagagacacttcatgttccgcacttttaccaccaaaaacgattcctacccgcagtttttccatcttaaaaacctatcccgtctaacacaaagtgcatacattaccacgacaaaacgggggattcgcggccttctgaaagattgttgcaatcttctgctgacaaagcgtgcaacgtactggtgaagaaagtgcgttatctcaaagatgtgcgcaagatcacaaaaatgatgaacgggaagctaatttattcctggcttaaatggccatgcggtgagtttttttctcttaattataagttaacgaagagaatatatttcataacttttatttataataaaggttgataattaaaagcctatattttgtgtgggtaattatttaaataagagaaacgtttcgctggtaatcaaacaaaaaatatttgcgcaaagtatttcctttgtcataaaaataatacttccagacactatgaagttgtgaaacataatgttaacttctccatactttggataaggaaatacagacatgaaaaatctcattgctgagttgttatttaagcttgcccaaaaagaagaagagagcaaagaactgtgtgcgcaggtagaagctttggagattatcgtcactgcaatgcttcgcaatatggcgcaaaatgaccaacagcggttgattgatcaggtagagggggcgctgtacgaggtaaagcccgatgccagcattcctgacgacgatacggagctgctgcgcgattacgtaaagaagttattgaagcatcctcgtcagtaaaaagttaatcttttcaacagctgtcataaagttgtcacggccgagacttatagtcgctttgtttttattttttaatgtatttgtacatggagaaaataaagtgaaacaaagcactattgcactggcactcttaccgttactgtttacccctgtgacaaaagcccggacaccagaaatgcctgttctggaaaaccgggctgctcagggcgatattactgcacccggcggtgctcgccgtttaacgggtgatcagactgccgctctgcgtgattctcttagcgataaacctgcaaaaaatattattttgctgattggcgatgggatgggggacagcgaaattactgccgcacgtaattatgccgaaggtgcgggcggcttttttaaaggtatagatgccttaccgcttaccgggcaatacactcactatgcgctgaataaaaaaaccggcaaaccggactacgtcaccgacagcgctgcaagtgcaaccgcctggagtaccggtgtcaaaacctataacggcgcgctgggcgtcgatattcacgaaaaagatcacccaacgattctggaaatggcaaaagccgcaggtctggcgaccggtaacgtttctaccgcagagttgcaggatgccacgcccgctgcgctggtggcacatgtgaccagccgcaaatgctacggtccgagcgcgaccagtgaaaaatgtccgggtaacgctctggaaaaaggcggaaaaggaagcattaccgaacagctgcttaacgctcgtgccgacgttacgcttggcggcggcgcaaaaacctttgctgaaacggcaaccgctggtgaatggcagggaaaaacgctgcgtgaacaggcacaggcgcgtggttatcagttggtgagcgatgctgccagtctgaatagcgtgacggaagcgaatcagcaaaaacccctgcttggcctgtttgctgacggcaatatgccagtgcgctggctaggaccgaaagcaacgtaccatggcaatatcgataagcccgcagtcacctgtacgccaaatccgcaacgtaatgacagtgtaccaaccctggcgcagatgaccgacaaagccattgaattgttgagtaaaaatgagaaaggctttttcctgcaagttgaaggtgcgagtatcgataaacaggatcatgctgcgaatccttgtgggcaaattggcgagacggtcgatctcgatgaagccgtacaacgggcgctggaattcgctaaaaaggagggtaacacgctggtcatagtcaccgctgatcacgcccacgccagccagattgttgcgccggataccaaagctccgggcctcacccaggcgctaaataccaaagatggcgcagtgatggtgatgagttacgggaactccgaagaggatagtcaagaacataccggcagtcagttgcgtattgcggcgtatggcccgcatgccgccaatgttgttggactgaccgaccagaccgatctcttctacaccatgaaagccgctctggggctgaaataaaaccgcgcccggcagtgaattttcgctgccgggtggtttttttgctgttagcaaccagacttaatggcagatcacgggcgcatacgctcatggttaaaacatgaagagggatggtgctatgaaaataacattactggttaccttgcttttcggtctggtttttttaaccaccgtcggcgctgccgagagaactttaaccccacaacaacagcgtatgacctcctgtaatcagcaggcgacggcgcaggcgttgaaaggggatgctcgtaagacctacatgagtgattgcctgaagaacagcaagtctgcgcctggcgaaaaaagtttgacgccacagcagcaaaagatgcgcgaatgcaataatcaagcaacacaacaatctctgaaaggtgatgatcgtaataagtttatgagtgcctgcctcaagaaagccgcctgatacctgatagtgctaacgggtgagctacgaaaatggctcacccgaaatatcatacttctgcctttagctccgtctctataatttgggaaaattgtttctgaatgttcccaaaaataatgaatgatgaaaactttttcaaaaaagcggcggcgcacggggaggaacctcctttaactcctcaaaacgaacatcagcggtccgggctgcgcttcgcccgtcgcgtcagactaccccgtgcggttggcctggctggcatgttcttaccgattgctagtacgctggttagtcacccgccgccgggctggtggtggctggtgttggtcggctgggcgttcgtctggccgcatttagcctggcagatagcgagcagggccgtcgatccgcttagccgggaaatttacaacttaaaaaccgatgcagtattagcgggaatgtgggtaggcgtaatgggcgtaaacgtgctgccttccaccgcgatgttgatgattatgtgtctgaatttgatgggggcaggcggcccccgtctgtttgtcgcgggtctggtgttgatggtggtttcctgccttgtcaccctcgagctgacgggcattaccgtgagcttcaatagtgcgccgctggaatggtggctctcccttcccattattgtcatttatcctctgctgtttggctgggtcagctaccagacggcaaccaaactggcggaacataaacgcaggttgcaggtcatgagtacccgcgacggcatgacgggcgtgtataaccgacgtcattgggaaactatgttacgcaatgaatttgataactgtcggcggcataatcgcgatgcaacgttactgattatcgatatcgaccatttcaagagcatcaacgatacctggggccatgatgtgggcgatgaagcgattgtggcgcttacccgacagttacaaattgccctgcgcggtagcgatgtgattggtcggtttggcggcgatgagtttgcagtaatcatgtccggtacgccagctgagagcgccattaccgccatgttacgggtgcatgaagggctaaatacattacgtttgccgaatacgccacaggtaactttacggattagtgtgggggttgcgccgctgaacccacaaatgagtcactatcgtgagtggttgaaaagcgcagatttggcgctttacaaagcaaagaaagccggacgtaaccgcaccgaagtggcggcctgacgtccggcgaaagtcatcaggatttgctgagtttttcacttttttccatacacttcgtcatcgcttcgatcactgcagcacggaagcctttctcttccagtacgcgtaccgcttcaatggtggtgcctcccggactgcagaccatatctttcagtgcccccggatgttctcccgtttccagcaccatttttgcggaacccattaccgcctgagcggcaaatttatacgcctgggcgcgtggcatcccgcccagcacggcggcgtcggccatcgcttcgataaacataaatacgtaggctgggctagaaccgctcacaccgaccaccgggtggatcatcggctcagcaattacttccgcttcgccaaagcagcggaaaatattcagcacatcagcggtatcttctggggttaccagcgcgtttggcgttacggaggtcatcccggcattaaccagtgcgggagtgttcggcatggcgcggataattttccggtcatggcccagcgcgcgggcaagctggtcgagcgtgacacctgcagcaatagaaacgaccagagagtctttattcaggctggaggtgatttcgctaagcactttaatcatgatgccaggtttaacggcagcaaaaatgatgtcggcgatttgcgccacttcttgcgcgctttctgcggcgttgatgccgaactggtcatgcagggcggcgactttatccggggagggggtgtatacccagatttgccctggaagcacctgaccgctggcaatcagaccgccgagaatggcttttcccatattgccgcagccaataaaaccgattttcttttccattgcctcactcctgccgtgaaattcattgttttgataatcgctggcagaagcataaacagaactatgccggaaggcaaaagcgcgacacaatagaggattacccaacaaaggatgactttatgacaatttgggtggatgccgacgcgtgtcccaatgtaattaaagagattttgtatcgcgcggcggaacgtatgcagatgccgctggtactggtagcaaaccagagtttacgcgtgccgccaagccgatttattcgtacgctgcgcgtcgcggcaggtttcgacgttgccgataacgaaattgtccggcagtgtgaagcgggcgatttggtgatcaccgcagatatacctttggctgctgaagccatcgagaaaggcgctgcggcgcttaatccgcgcggcgaacgttacacgccagcgaccattcgtgagcgcctgacgatgcgcgattttatggataccttacgtgccagtgggatccagaccggcggaccagatagccttagtcaacgtgaccgccaggcctttgccgcggagctggagaagtggtggctggaagtgcaacgtagtcgtggctaaatgtaatttattatttacacttcattcttgaatatttattggtatagtaaggggtgtattgagattttcactttaagtggaattttttctttacaatcgaaattgtactagtttgatggtatgatcgctattctcatgacaccggctttcgccgcattgcgacctattggggaaaacccacgatgacacaacctctttttctgatcgggcctcggggctgtggtaaaacaacggtcggaatggcccttgccgatagccttaaccgtcggtttgtcgataccgatcagtggttgcaaagtcagctcaatatgacggtcgcggagatcgtcgaaagggaagagtgggcgggatttcgcgccagagaaacggcggcgctggaagcggtaactgcgccatccaccgttatcgctacaggcggcggcattattctgacggaatttaatcgtcacttcatgcaaaataacgggatcgtggtttatttgtgtgcgccagtaagtgtcctggttaaccgactgcaagctgcaccggaagaagatttacggccaaccttaacgggaaaaccgctgagcgaagaagttcaggaagtgctggaagaacgcgatgcgctatatcgcgaagttgcgcatattatcatcgacgcaacaaacgaacccagccaggtgatttctgaaattcgcagcgccctggcacagacgatcaattgttgattttcgagcgcctatacttaacgttcatcccgtgaaataaggaagaacgatgccaacgaaaccgccttatcctcgtgaagcatatatagtgacgattgaaaaaggaaagccaggacagacggtaacctggtaccaactcagagccgatcatcctaaaccagacagcttgatcagtgaacatccgaccgctcaggaagcgatggatgcgaaaaaacgctatgaggaccctgacaaagagtgaccgcatcagactgctcggaagggattctgagtgccactacaagggatctgcgtcacatttttcataattcatgtttttctaataattagaatattaaacaataacaatccattactggaatcatttggaatctttacattatgccgtgcacgtctgctgctacgctttttgtcatttgtagcacaagtaagtgtcagcagtggtgcttcacacttgcccggtaattaacgacgaaagaaaagtaaggtggatgaacaatgagtgcgagcttggcgatcctgaccatcggcattgtacctatgcaggaagttttgccgctcctgacggaatacattgacgaagataatatttcccatcatagcctgctggggaagttaagtcgtgaagaagtgatggcggagtacgcgccagaagcaggcgaagacaccattctcacattattaaatgacaaccagctggcccatgttagccgtcgcaaagtggagcgtgacctgcaaggtgtggttgaagtgctcgataatcagggttatgacgtcattttattaatgagtacagcaaacattagtagtatgactgcgcgtaatacgatctttcttgagccgagccgaatattgcctccactggtttcctctattgttgaagatcatcaggtgggggttatcgttccggttgaggagatgctgcccgttcaggcgcaaaaatggcaaattttgcagaaaagcccggtatttagtttgggtaaccccattcatgatagtgaacaaaaaatcattgatgccgggaaagaattactggcaaaaggggctgatgtcatcatgctggattgtttaggatttcaccaacgtcatcgcgatttactgcaaaaacagctcgatgttcctgtcttgctgtctaacgtattgattgcacggctggctgcggaattactggtgtaattttgcgtgacagccagcgcctctggcccctatagtgaagtagatgttcaactaccaaacagggccagtttatgcttcaaagtaatgagtacttttccggcaaagtgaaaagtatcggcttttccagcagcagcactggtcgcgccagcgtgggtgttatggttgaaggcgaatacaccttcagcaccgctgagccggaagagatgacggtaatcagtggcgcgctgaatgtgttactgcctgacgcgaccgactggcaggtgtatgaagccggtagcgtgtttaatgttcccggtcacagtgagtttcatctgcaagttgccgaacccacctcttatctgtgccgctatctgtaattcctcgccttccccttgaacgggagggcatttttctgaaatatcctttctttagcccataataatatttcctttgctgcgattttttcaatttccgatatattcataatttatcaaggttgatataaatatcagtgaagatctccagatattgttgcggaactggctacgataaaagataaatcagatgatgaatggtggcgtgcattgctgcaaagtcgcaatgatcatttacgccaaacggcattgcgcaacgcacataccccggcgttgttgttaacgacattgactgagcctcaggatcggagcctggctattaataatccacagctggctgccgatgtgaaaacggcgtggttaaaagaggatccaagtttactcttatttgtcgaacaacccgatcttagcctgttacgtgatttagtgaaaaccggggcaacgcggaaaattcgcagtgaagcgcgtcaccggcttgaggaaaaacaatgacacaacgtccatggagcaagttacagcgtaaaacgcataatattgctgcgctaaaaattattgctcgccgtagcgaataattatatgcctggtgtggcttcgtacgccggataagacgcggcaggcgtcgcatccggcattaaaggaaaatcagcaattaacgttgtgcttcgccacctaatccttcaatcaggttttgaattaacgctgccagttcaccagtcatcaggatgaaatcggcatcaaaacgctgggcgaaatcttcacggtcgatatcttcgttttgatcgcgcagctcgtcgcagaacttcagacgcttgaggctaccatcgtcgcacatcacaaactgaatgcgctgctgccagtcgagcgccagtttagtcaccacttttccggcttcaatgtgattggtgatctcttcgctggtcagatcttgtttcttcgcgcggatcacgccgccatcttccagcaagcttttcagctcggcttcatcaagcagctggaagccctgtgccgcactgccggagcgaacccattcggtcagcgtcagttcaatcgggttttccatgctcaatggtacaaccggtaagctccccaggcttttacgcagtaatgccagcgtatcttccgcttttttggcactggcgcagtccaccataatcaaaccgttaaccgtgtcgatccacatcattgtctggctaaaacggctgaaagcacgcggcagcagagagtgcagcacttcgtctttcaggctatctttttcggttttcttcagcttacgcgcctgttccgcttccagtttggcgattttcgcttccagcgcctgtttaatcaccggagacgggaggattttttcttctttgcgcgcgcagataacaatttgaccattggcaacgtgcgttaacgcatcgctgtggcttcccatcggaggaacccagcccatcttcgccatgtcctggctgccgcatggggtaaatgccatgctggctagctgtttttccatctcttctgcacgcaggctaatctcgcggctaagacggtaaaccattaaatttttgaaccacagcatgataatttccacggccttgtcgttaaatttagcgggcatgataacgaattgtcggcggccttgcattgccaatccggttgtccgtctctacgctattgatattgaaaaaaataaggagagtaccgtgcgtataggtatcgatttaggcggcaccaaaactgaagtgattgcactgggcgatgcaggggagcagttgtaccgccatcgtctgcccacgccgcgtgatgattaccggcagactattgaaacgatcgccacgttggttgatatggcggagcaggcgacggggcagcgcggaacggtaggtatgggcattcctggcagtattagcccttacaccggtgtggtgaagaatgccaatagtacctggctcaacggtcagccattcgataaagacttaagcgcgaggttgcagcgggaagtgcggctggcaaatgacgctaactgtctggcggttagtgaagcagtagatggcgcggcagcgggagcgcagacggtatttgccgtgattatcggcacgggatgcggcgcgggcgtggcattcaatgggcgggcgcatatcggcggcaatggcacggcaggtgagtggggacacaatccgctaccgtggatggacgaagacgaactgcgttatcgcgaggaagtcccttgttattgcggtaaacaaggttgtattgaaacctttattagcggcacgggattcgcgatggattatcgtcgtttgagcggacatgcgctgaaaggcagtgaaattatccgcctggttgaagaaagcgatccggtagcggaactggcattgcgtcgctacgagctgcggctggcaaaaagcctggcacatgtcgtgaatattctcgatccggatgtgattgtcctggggggcgggatgagcaatgtagaccgtttatatcaaacggttgggcagttgattaaacaatttgtcttcggcggcgaatgtgaaacgccggtgcgtaaggcgaagcacggtgattccagcggcgtacgcggcgctgcgtggttatggccacaagagtaaaaaacgtaggcaattggcgcatcatgcctgatgcgacgcttgccgcgtcttatcaggcctacaaaaggtgccagaaccgtaggccggataaggcgttcacgccgcatccggcaataagtgctccgatgcctgatgcgacgcttgccgcgtcttatcaggcctgcaaaatgtgccagaaccgcgtagggcggataaggcgttcacgccgcatccggcaataagtaatgagcaccgagactataacttaccccagtggtttcgccagcaccggagtatccgccgcttgctggcgcttatagcgaccatacagcagcaagctgctcatcgcagcaaagctaagcagggcggcaggcagcgccacgtaattatatgccagccccagcgtcagcatcatacctccgcaatatgcgccgacggcgctaccgaggttaaacgctatttgcccacctgcggcacctaataactctccgcctttggcgttttgtagtaacaatatttgtagcggtgcactaagggcaaataatcccgcgcaacaaataaaagcaaaaataaggctcgttgttttcatgccgccgcagaaaaagagcatcagcagtgccagtacaattataaagtcagttactgctgcaatgcgcagtggactataacgtccactaatcctgccacttagcatatttcccagcaccatccctagcccaactaacatcataataaaggtcatcgccgtttcgctaaaaccggaaataaacatcatgtatggctttacgtagctgaaccaggcaaacacacctgcgttgccaaacatcgtggcggcgaaaattaaccacggggccgggctgcgcaaaaagtgaaattgttcgcgcagatttcctttcgcctcgtcgcgaatatctggcacccaaaaatagacgcttgccatcaccgcaatattaaaaacagcgatcaataaaaaggtgtaacgccagctaaattcctgacttaaatacgttcccagcggaatgcccagcaaattggcgactgtcatcccggaaaccatccccgccacggcggcggtgacttttccgggtttgataattttacttaacacgatcgctccgacgccaaaaaatgcgccatgcggaaagccggataccagccgaccaatggcgagcatcaggtaagagctagagagcgtgaacatggcgttgccaatgacgcacaacgccaccagaaacaacaagatatgtttgagactgtagcggctggaaaagagtgcgatgattggcgcaccgaccaccacccccagtgcataatagctgatcatatgcccggcggcaggaatgctaattcctacgttatgcgccagctccgtgagcacgcccataatgccaaattcggccatccccaaaccaaacgtgcccagagccaaagataaaatgacttttttcataccaccatcacaaccaccagaacggctaccaatcaccgtagccaataaagtgatagcttgcaggataacgaccagcaaggccaagagataattcgcccctctgtattcattatcctgctgaatagttatttcactgcaaacgtactttccagtttgctgtagcccaggccgttgatctttttcactttgatctgcaccggaatacgctctttcatcgcttctacgtggctaatcacaccgatggttttgccactggcgttcagggcatccagcgcatcaagggcggtatccagcgtttcgctatccagcgtgccaaaaccttcatcaaggaacaggctgtcaatacgtgttttatggctgaccagatcgctaagcgccagcgccagcgccagactaacgaggaaactttcgccgccggaaagggtacgggtatcgcgtaccgcatctgcctgccaggtatcaacaacctcgacttccagcgcctcgctggctttgcgctgtaacagatagcgcccgtgcagccgggtaagttgctgattagcgagatggactaaattatccagcgtcagcccctgggcaaacttgcggaatttatcgccctctttggaacctattaggctattcagatatccccagtcctcaacctgctgcgtcatttgagcaatttgctgcattaaggtttgttgttgctgacggttatctgcatcctgcttcagctgctggcgaatctcgccttgactcgtggtgttttcacgcaacttttggtgagtttgcgctaactcttgctgaatctgctccaccgtcacagtgagagccaacccgtcgtcaggtcggtgttgttgatgctgtgccagcgtttctgctgtctgagtgaccagagtttgcgcctgacggcgctggttttccagattctgcttgagctgttccagctgcgttagtgtttgttcatccattagcgccgcaaggaacgcctgctgatcgtcaaagacgctggcctgtagcgcggtgtcaaactgcgcctgggctttttgcagactttgcgccgccagaacatcctgttgctgtaacgtctgctgctggctgtgtaatgcgagacattgttcatgtacctgccgccagttttccaataccacagtttcttcgcagtgcgggagttcatcactttgcggcaacgtttccagaatcggcgtcagctgctgaatacggttttgcagcgcggttaattcgttctggcgttgctgccagctctgcgcttcttgctgacgtgtcgccaaccagctctcttcttcatcttcctgtggcaatgtcagtgcataacccgtcaatgtcgttaaaagtagttgctggcgttgttcaatttgctgttgatactggataatttgctgattatgcgcggcaatctgcccttgtaattcatgccgttggctgagtaaccgcagctggcgttcgtgctcatcttgtgcatccagccacggttgaatatcgtccagtggctgcaaggtgatattgaggctggccgtgacggcttgccattgttgagtaagtgcttgctcatcttgtcggaggctttgcgcttcgttttcatcacgctgaagctgctttgttatggcgtccagttgcccacgtagcgtcgcaccttcttcaccgagctttttaacttcgttttccagcgccagtaatcgagactgattaacgccaggctccagcgcctgatacgcctcgaccgccgggtggctggtggaaccacaaagtgggcaaggctgacccgcctgtaactgtgcacgttgagcttccagcgttttgatgcgcgcttcctgctcgcaaatggttttcacatcggcaagttgctgcgtcttttctttataacgctggcgcatttcgttaagtgcggcgttacgttgcgtctgttcttgcgtgacattctggatagcgacctgtaactgcgccagacgtttttgttggggaacaatctgtccatgcagcgcgaccaggtgctgacgcagtgggcgttgctcagcatgttgcgccagggcggtagcaacttcatcggcggttaacgtcaacgtgatcgccgcaagcgcattaagtttttgctcagcatgggttaactgttgctgccattgccgcagatgctcgcgatcgctggtttgttgggagaactgcgcacgccaacccgccggttcgttgttccactgacggaagcggtcgtgttcctgtaaccaggtattcaggctttgttgctgctgctgtaattctgcactctgcttcgccgcgtggtggcgaatgctcgcgcgaagcgccattgtgctctgtaagcgagtatttacttcttcaatctgctggcgaatatgcgccagcgccgcgctgtgttctgcgatgcgttcccagtgtggacgaagatttcgtgccggttgtgccagactaagcgccgccagttgaggttgcgctttttcttcttcggctaacgcctgttgcaaggcctgctgacggcggctggcttcttgctgcaattcgtcctgacgcgttaaccagtttaggctttgttgttcttgctgctgcgcggtaattaactgtttttcttcgtcagtaagtacctgcaaactcgctgtcaggctttgcacttgttccggcgtgagcaacgtgacgccgctggcctgcgcttgcagcttctccagctctgtgcgggcgcttttgtgctgctcaaaaaccatcgcgctgatttgcccgtagatttcagtgccggttaactcctcgagcaattccgcgcgttctttgggtttggcattcaggaaggcagcaaattgcccctggctaagcagcatgctacgggtgaagcgcccgtaatccagcccggttaacgtcgctgtcagttccagcttatctttcactttgtcggcgagaattttgccgtcggcgcagcgcgccagctctacgcgtggcacctgcaaattaccgtcgggttggttacgcgcccgattctggctccagaatgcacggtacgcttcacctttcacttcaaactccacctccgccagacattcggcggtatcgcgggtcatgagatcattttggctttgactaacgttagagagacgcggagtttcgtgatacagcgccagacaaatggcgtccagcagggtggttttccccgcacctgttgggccggtaatagcaaacagcccgttgctggcgaacggctcgcgggtgaaatcaatcttccattcgccttttaaactgttcaggtttttcaggcgcaggctgagaattttcatgcttcgtgttctccggcgagggtatgcaacgtcgtggtgaaaagatgctgcagacgttgctgctggctttcatccagttcttccagtgccagacggcgattgaacacctcttcgacgctgagttcgctgagggtttcacgctgttggctggctaacacacgctcgcgctgttcacgactccgacgtaccagcaatacttcgacaggcaaactttcggttaatgcctggattttgcgctgaatatcatgcagatactcatcagtagtgatttcgatatccagccagacaggtggctcctggcttacatcgcgccactgttccagctgtgcggtaatgctcgccagatcgcctttcagcactgccatgggttgcgttaccggtacgttcaggttttccacgctctctaatttgccgttactaaatgtcaccagatggacatatttactcttaccgcattcatcaaaactcagtggaatgggggagccgcaatagcgaacatgttccatgccgccaataatctgtgcgcggtgaatatgcccgagcgcgatgtagtcggctggtggaaagttttgtgccggaaacgcgtccagcgtgccaatataaatgtcacgcacggcgtcacttttactggcccccacggtcgttaaatgtcccgtggcgatgatgggcagaggctgatcgccgcgcagtttgcaggcatcggcatagtgttgttggtaataatcggtaatcgctgccagtaaatgctgctgtttttcaataccgttaagccccgcctggctggtaataatgtcacgcggacgtaaaaacggaatggggcacagcactgcgcctggcgtcccgtcgcgacgaggcaagatttgcggcgcatgtccggcgctggcgaccacggtagtattgaggaacgccatgatatcgcggctttcattcagcgtggcgacgctgtcatggtttcctgccagtaccaccagatgacagccagtttgctgtaaattgacaacaaaacggttgtataacgtgcgggcgtaactgggcgggctgccggtatcgaaagcatcaccggcaacaataatcgcatccacctgatgggtttgtgctgtctccagcagccagtcaagaaaagcctgatgttcagcttcgcggcttttactgtagaagttctggccgagatgccagtcactggtgtgaaggatgcgcataacggttccctggcgaaaaagcatgggcgcgattatacccaaacagatgtgccatttgcttttttctgcgccacggaaatcaataacctgaagatatgtgcgacgagcttttcataaatctgtcataaatctgacgcataatgacgtcgcattaatgatcgcaacctatttattacaacagggcaaatcatggcgagacgtattctggtcgtagaagatgaagctccaattcgcgaaatggtctgcttcgtgctcgaacaaaatggctttcagccggtcgaagcggaagattatgacagtgctgtgaatcaactgaatgaaccctggccggatttaattctcctcgactggatgttacctggcggctccggtatccagttcatcaaacacctcaagcgcgagagcatgacccgggatattccagtggtgatgttgaccgccagaggggaagaagaagatcgcgtgcgcggccttgaaaccggcgcggatgactatatcaccaagccgtttagcccgaaggagctggtggcgcgaatcaaagcggtaatgcgccgtattagcccaatggcggtggaagaggtgattgagatgcagggattaagtctcgacccgacatctcaccgagtgatggcgggcgaagagccgctggagatggggccgacagaatttaaactgctgcacttttttatgacgcatcctgagcgcgtgtacagccgcgagcagctgttaaaccacgtctggggaactaacgtgtatgtggaagaccgcacggtcgatgtccacattcgtcgcctgcgtaaagcactggagcccggcgggcatgaccgcatggtgcagaccgtgcgcggtacaggatatcgttttagtacccgcttttaacgccttgctcatcggacgcagagcagggcttatgatttcttaactggagtatcttacgtgctggaacggctgagctggaaaaggctggtgctggagctgctactttgctgcctcccggctttcatcctgggtgcattttttggttacctgccctggtttttgctggcaagcgtaacaggactgcttatctggcatttctggaatttattgcgccttagttggtggctgtgggtggatcgcagtatgaccccgccaccggggcgtggtagctgggaaccgctactatacggcttacaccagatgcagctgcgaaataaaaaacgccgccgtgaactgggcaatctgattaaacgctttcgtagcggcgcggagagcctgcccgacgcggtggtgctgaccacggaagagggcggtattttctggtgtaacggtctggcgcaacaaattcttggtttgcgctggccggaagataacgggcagaacatccttaacctactgcgttacccggagtttacgcaatatctgaaaacgcgtgatttttctcgcccgctcaatctggtgctcaacaccgggcggcatctggaaattcgcgtcatgccttatacccacaaacagttgctgatggtggcgcgtgatgtcacgcaaatgcatcaactggaaggggcgcggcgtaacttttttgccaacgtgagccatgagttacgtacgccattgaccgtgttacagggttacctggagatgatgaatgagcagccgctggaaggcgcggtacgcgaaaaagcgttgcacaccatgcgcgagcagacccagcggatggaaggactggtgaagcaattgctgacgctgagcaaaatagaagccgcaccgacgcatttgctcaatgaaaaggttgatgtgccgatgatgctgcgcgttgttgagcgcgaggctcagactctgagtcagaaaaaacagacatttacctttgagatagataacggcctcaaggtgtctggcaacgaagatcagctacgcagtgcgattagcaacctggtctataacgccgtgaatcatacgccggaaggcacgcatatcaccgtacgctggcagcgagtgccgcacggtgccgaatttagcgttgaagataacggaccgggcattgcaccggagcatattccgcgcctgaccgagcgtttttatcgcgttgataaagcgcgttcccggcaaaccggcggtagcggattagggttagcgatcgtgaaacatgctgtgaatcatcacgaaagtcgcctgaatattgagagtacagtaggaaaaggaacacgtttcagttttgttatcccggaacgtttaattgccaaaaacagcgattaatccgcctttgtcatcttttattgccataagccagtcgatgctggcttattttctttgcagtcaaaatacgggcgttagattttacaacgattggtgattttttgttcgcatgattagccatgtctttttcacggaaatagtgttttatactggttggtgatttcttatcgctatatacctctggtttttagatccctccttgctttaaaacgttataagcgtttaaattgcgcttcaggtgctgtcatactgactgcattaacgcggtaaatcgaaaaactattcttcgccgcgcctggttgggagtatttcccgctaaaattgtttaaatataccgctgtatcatccccagggattggcacaaaaatttaacgttacaacaccacatccacaggcagtatgatttatgacccatcaattaagaagccgcgatatcatcgctctgggctttatgacatttgcgttgttcgtcggcgcaggtaacattattttccctccaatggtcggcttacaggcaggcgaacacgtctggactgcggcattcggcttcctcattactgccgttggcctgccggtattaacggtagtggcgctggcaaaagttggcggcggtgttgacagcctcagcacgccaatcggtaaagtcgctggcgtactgctggcaacggtttgttacctggcggtggggccgcttttcgctacgccgcgtacagctaccgtttcctttgaagtggggattgcgccgctgacgggtgattccgcgctgccgctgtttatctacagcctggtctatttcgctatcgttattctggttagcctctatccgggcaagctgctggataccgtgggcaacttccttgcgccgctgaaaattatcgcgctggtcatcctgtctgttgccgctattgtctggccggcgggttctatcagcacggcgactgaggcttatcaaaacgctgcgttttctaacggcttcgttaacggctatctgaccatggatacgctgggcgcaatggtgtttggtatcgttattgttaacgcggcgcgttctcgtggcgttaccgaagcgcgtctgctgacccgttataccgtctgggctggcctgatggcgggtgttggtctgactctgctgtacctggcgctgttccgtctggggagtgacagcgcgagcctggtcgatcagtctgcaaacggcgctgctattctgcatgcttacgttcagcacacctttggcggcggcggtagcttcctgctggcggcgttaatcttcatcgcctgcctggtaacggcagttggcctgacctgtgcttgtgcagaattctttgcccagtacgtaccgctctcttatcgtacgctggtgtttatcctcggcggcttcagcatggtggtttctaacctcggcttaagccagctgatccagatctccgtaccggtgctgaccgctatttatccgccgtgtatcgcactggttgtattaagttttacacgcagttggtggcataatagctcccgcgtgattgctccgccgatgtttatcagcctgctttttggtattctcgacgggatcaaagcatctgcattcagcgatatcttaccgtcctgggcgcagcgtttaccgctggccgaacaaggtctggcgtggttaatgccaacagtggtgatggtggttctggccattatctgggatcgcgcggcaggtcgtcaggtgacctccagcgctcactaaatcactgaacatttgttttaaccacggggctgcgatgccccgtggttttttattgtgttgatgggttaggaattgatggaaagtaagaacaagctaaagcgtgggctaagtacccgccacatacgctttatggcactgggtagtgcaattggcaccgggctgttttacggtagcgcagacgccatcaaaatggccggtccgagcgtgttgttggcctatattatcggtggtatcgcggcgtatatcattatgcgtgcgctgggggaaatgagcgtacataacccggccgccagctctttcagccgttatgcgcaggaaaacctcggcccgctggcaggttacattaccggctggacctactgctttgaaatccttattgtcgccatcgccgatgtgaccgcttttggtatctatatgggtgtctggttcccgacggtgccgcactggatttgggtactgagcgtggtgctgatcatttgcgccgtaaacctgatgagcgtgaaggtattcggtgagctggaattctggttcagcttctttaaagtcgccaccatcatcatcatgattgtcgccggtttcggcatcatcatctgggggattggcagcggcgggcaaccgaccggtattcataacctgtggagcaacggcggcttcttcagtaacggctggcttggcatggtaatgagcttgcaaatggtgatgtttgcttacggtgggatcgaaattatcgggattaccgccggtgaagcgaaagatcctgagaaaagcataccgcgtgcgattaactccgtgccgatgcgtattctggtgttctacgtcggtacgctgttcgtcattatgtctatctacccgtggaatcaggttggcactgccggtagcccgttcgtgctgacgttccagcatatgggcattacctttgccgccagcattcttaactttgttgtgctgactgctagcctgagcgcaattaacagtgatgtatttggcgtaggccgtatgctccacggtatggcagagcagggcagcgcgccgaaaattttcagcaaaacgagccgtcgcggtattccgtgggttacggtgctggtgatgactaccgcgctgctgtttgcggtgtatctgaactacatcatgccggaaaacgtcttcctggtgatcgctagcctggcaaccttcgccacggtgtgggtgtggattatgatcctgctgagccaaattgccttccgtcgccgtttgccgccagaagaagttaaggcgctgaaatttaaagtgccgggtggggtagcaacgaccatcggcgggctgattttcctgctctttattatcgggttgattggttatcacccggatacgcgtatcagcctgtatgtcggtttcgcgtggattgttgtgctgttgattggctggatgtttaaacgccgccacgatcgtcagctggctgaaaaccagtaatccttgcgttctgtaagccggttcaggaggaaatcctgatccggctattccgaaagttatccgcccccgtcctcctcccccaaatatccttcagatgatgagtgatcctgcattaggctatggcaaggtgatcagattttcatcacaggggaattatgatgttaaatgcatggcacctgccggtgcccccatttgttaaacaaagcaaagatcaactgctcattacactgtggctgacgggcgaagacccaccgcagcgcattatgctgcgtacagaacacgataacgaagaaatgagtgtaccgatgcataagcagcgcagtcagccgcagcctggcgtcaccgcatggcgtgcggcgattgatctctccagcggacaaccccggcggcgttacagtttcaaactgctgtggcacgatcgccagcgttggtttacaccgcagggcttcagccgaatgccgccggcacgactggagcagtttgccgtcgatgtaccggatatcggcccacaatgggctgcggatcagattttttatcagatcttccctgatcgttttgcgcgtagtcttcctcgtgaagctgaacaggatcatgtctattaccatcatgcagccggacaagagatcatcttgcgtgactgggatgaaccggtcacggcgcaggcgggcggaagtacgttctatggcggcgatctggacgggataagcgaaaaactgccgtatctgaaaaagcttggcgtgacagcgctgtatctcaatccggtgtttaaagctcccagcgtacataaatacgataccgaggattatcgccatgtcgatccgcagtttggcggtgatggggcgttgctgcgtttgcgacacaatacgcagcagctgggaatgcggctggtgctggacggcgtgtttaaccacagtggcgattcccatgcctggtttgacaggcataatcgtggcacgggtggtgcttgtcacaaccccgaaagcccctggcgcgactggtacagctttagtgatgatggcacggcgctcgactggcttggctatgccagcttgccgaagctggattatcagagcgaaagtctggtgaatgaaatttatcgcggggaagacagtattgtccgccactggctgaaagcgccgtggaatatggacggctggcggctggatgtggtgcatatgctgggggaggcgggtggggcgcgcaataatatgcagcacgttgccgggatcaccgaagcggcgaaagaaacccagccggaagcgtatattgtcggcgaacattttggcgatgcacggcaatggttacaggccgatgtggaagatgccgccatgaactatcgtggcttcacattcccgttgtggggatttcttgccaataccgatatctcttacgatccgcagcaaattgatgcccaaacctgtatggcctggatggataattaccgcgcagggctttctcatcaacaacaattacgtatgtttaatcagctcgacagccacgatactgcgcgatttaaaacgctgctcggtcgggatattgcgcgcctgccgctggcggtggtctggctgttcacctggcctggtgtaccgtgcatttattacggtgatgaagtaggactggatggcaaaaacgatccgttttgccgtaaaccgttcccctggcaggtggaaaagcaggatacggcgttattcgcgctgtaccagcgaatgattgcgctgcgtaagaaaagtcaggcgctacgtcatggcggctgtcaggtgctgtatgcggaagataacgtggtggtatttgtccgcgtgctgaatcagcaacgtgtactggtggcaatcaaccgtggcgaggcctgtgaagtggtgctacccgcgagtccgtttctcaatgccgtgcaatggcaatgcaaagaagggcatgggcaactgactgacgggattctggctttgcctgccattagcgctacggtatggatgaactaacgttttataacgccttgcgactcgcctgcgccatcatccgcggataaaactgccagaagcgggtttcgagggcgtcataatgagcgtctaaatcgtaccaggagtcacgcagggcatccagacgtgggcggcggcttgccatgccgtttaacacgttctggatgaaatccatatcgcgatagcgcaccagccactgctcactccacaagtaattgttcagattgataaaacgtggcggactgtccggcaaaatcgtcatcacttgctcgcgggcataacagacaaattcctgtagcggaaagtccgggctcagctggctccagtggcgggaaagaaagtgatcccacatgacatccagcgtaataggcgcaacgcggcgcgtttcactacgaaaccactcccgtgcttcgcggacttccggcagattgtcagtcaatacgtcgatacgtcgatgcatatgaatgccagccacgacgtcgggcggaaaactttcttcaggatttccgcgtacgaaatcagccagtaaattgccggaaaggctgctttccgcgagatgggctaaatgcaggtgagctaaaaaattcatcgattatattctatccaaaagggggtaaaggttgcagggagagcgccccggcactagactacccgcctcttattttagtctgagtcagtgtcatgcgcgttaccgatttctcctttgaattgcccgaatccctgattgcccactatcccatgcctgaacgcagtagctgtcgtttactgagcctggacgggccgacgggcgcgctgacgcacggtactttcaccgatttacttgataagctcaaccccggcgatcttctggtttttaataatacccgcgtgatcccggcgcgcctgtttgggcgtaaagccagcggcggcaagattgaagtgctggttgaacggatgctcgacgacaaacgcattcttgcgcatattcgcgccagcaaagcgccaaaacctggcgcagaactgctgctgggcgatgacgaaagtattaacgcaacaatgaccgcgcgccacggcgcactgtttgaagtcgaatttaatgatgaacgcagcgtgctggatattctcaacagcatcggccatatgccgctgccgccgtatatcgaccgtccggacgaagacgctgaccgcgaactttatcaaaccgtttatagcgaaaaaccgggcgcggttgcagccccgaccgcaggtctgcattttgacgagcctttgctggaaaaattgcgcgccaaaggcgtggagatggcgtttgtgacgttgcacgttggtgcgggcaccttccagccggtgcgcgtcgacaccattgaagatcacatcatgcacagcgaatacgctgaagtaccgcaggatgtggtagacgcggtactggcggcgaaagcgcgcggtaaccgggtgattgcggttggcaccactagtgtacgtagcctggaaagcgcggctcaggcagcgaaaaacgatctcattgaaccgttcttcgacgatacccaaatctttatctatccgggcttccagtacaaagtggtcgatgcgctggtgacgaacttccacttgccagagagcacgctgattatgctggttagcgcctttgccggttatcaacacaccatgaacgcctataaagcagcggtagaagagaaatatcgcttttttagttacggtgatgcgatgtttatcacgtacaatccgcaggcaattaatgagcgcgtcggggagtaattccgcggcgctggtttaaaacgttggactgtttttctgacgtagtggagaaaaaatgaaatttgaactggacaccaccgacggtcgcgcacgccgtggccgcctggtctttgatcgtggcgtagtggaaacgccttgttttatgcctgttggcacctacggcaccgtaaaagggatgacgccggaagaagttgaagccactggcgcgcaaattatcctcggcaacaccttccacctgtggctgcgcccgggccaggaaatcatgaaactgcacggcgatctgcacgattttatgcagtggaaggggccgatcctcaccgactccggcggcttccaggtcttcagccttggcgatattcgtaaaatcaccgaacagggcgtgcacttccgtaacccgatcaacggcgatccgattttcctcgatcctgaaaaaagtatggagattcagtacgatcttggtagcgatatcgtcatgatctttgatgagtgtacgccgtatcctgctgactgggattacgcaaaacgctccatggagatgtctctgcgttgggcgaagcgtagccgtgagcgttttgacagtctcggaaacaaaaatgcgctgtttggtatcatccagggcagcgtttacgaagatttacgtgatatttctgttaaaggtctggtagatatcggttttgatggctacgctgtcggcggtctggctgtgggtgagccgaaagcagatatgcaccgcattctggagcatgtatgcccgcaaattccggcagacaaaccgcgttacctgatgggcgttggtaaaccagaagacctggttgaaggcgtacgtcgtggtatcgatatgtttgactgcgtaatgccaacccgcaacgcccgaaatggtcatttgttcgtgaccgatggcgtggtgaaaatccgcaatgcgaagtataagagcgatactggcccactcgatcctgagtgtgattgctacacctgtcgcaattatagtcgcgcttacttgcatcatcttgaccgttgcaacgaaatattaggcgcgcgactcaacaccattcataaccttcgttactaccagcgtttgatggcgggtttacgcaaggctattgaagagggtaaattagagagcttcgtaactgatttttaccagcgtcaggggcgagaagtaccacctttgaacgttgattaatattaataatgagggaaatttaatgagcttttttatttctgatgcggtagcggcaacgggtgcaccggcgcaaggtagcccgatgtctttgattttgatgctggtggtattcggtctgattttctatttcatgatcctgcgtccacagcagaagcgcaccaaagaacacaaaaagctgatggactccattgccaaaggtgatgaagttctgacgaacggtggcctggttggtcgcgtaaccaaagtagcggaaaacggctacattgctatcgcgctgaatgacaccactgaagtagttattaaacgtgacttcgtagctgccgtcctgccgaaaggcaccatgaaggcgctgtaattaaaatttttccctaagggaattgccgtgttaaaccgttatcctttgtggaagtacgtcatgctgatcgtggtgattgtcatcggtctgctgtatgcgcttcccaacctgtttggtgaggatccggctgttcagatcactggtgcgcgcggagtcgccgccagtgagcaaacgctgatccaggtccagaaaacgttacaagaagaaaaaataactgctaagtctgtggcactggaagagggcgctattcttgcgcgcttcgactccactgacacccagttgcgcgctcgtgaagcattaatgggcgttatgggtgacaaatacgtcgtggcgcttaaccttgccccggcaacgccgcgctggctggcagctattcacgctgagccgatgaagctcggccttgacctgcgtggcggcgttcacttcctgatggaagtggatatggacaccgcgcttggcaaactccaggaacaaaatatcgatagcctacgcagtgacctgcgcgaaaagggcatcccgtataccactgttcgtaaagaaaacaactacggcctgagcatcactttccgcgatgctaaagctcgtgatgaagccattgcgtatctgagcaagcgccatccggacctggtgattagcagccagggcagcaaccagctgcgtgcggtaatgagcgatgctcgtctgagtgaagcgcgtgaatatgcggtgcagcagaacattaatatcctgcgtaaccgtgtaaaccaacttggcgtggcggagccggtggttcagcgtcagggtgctgaccgtatcgttgttgaactgccaggtattcaggacactgcgcgtgcgaaagagattctgggtgcgacggcaacgctggaattccgtctggtaaacaccaacgttgaccaggccgctgcggcatccggtcgcgtaccgggcgactctgaagtgaaacagacccgcgaaggtcagccagttgtgctgtacaaacgcgtaattctgaccggtgaccatatcaccgactccacttccagccaggacgaatacaaccaaccgcaggttaacatcagcctcgatagcgctggtggtaacatcatgtctaacttcactaaggacaacatcggcaaaccgatggcaaccctgtttgtggagtacaaagacagcggtaagaaagatgcaaatggtcgtgcggttctggtgaaacaggaagaggtgattaacatcgccaacatccagtctcgtctgggtaacagcttccgtatcaccggcatcaacaacccgaacgaagcccgtcagctgagtctgctgctgcgtgccggtgcgttgatcgcgccgattcagattgttgaagaacgtaccattggcccaaccctgggtatgcagaacattgaacaggggctggaggcttgccttgccggtctgctggtttctattctgttcatgatcatcttctataagaagtttggtctgattgcgaccagtgctctgattgccaacttgatcttaatcgtcggcattatgagcctgttgccaggcgcaacgctgagtatgccaggtatcgcgggtatcgtcttaacccttgcggtggcggtcgatgcgaacgtactgatcaacgaacgtattaaagaagagttgagcaacggacgtactgttcaacaggcaattgatgaaggttatcgtggcgcattcagttctatcttcgatgcgaacatcaccacgctgattaaagtcatcatcctgtacgcagtgggtaccggggcaattaaagggttcgcgattactaccggtatcggtgtggcgacgagcatgtttaccgcgattgtcggtacgcgtgccatcgtaaacctgctatatggcggcaagcgcgtcaagaagctgagtatctgaggagtgcgatgtggcacaggaatatactgttgaacaactaaaccacggccgtaaagtctatgactttatgcgctgggactactgggctttcggcatctctggtctgctgttaatcgctgctatcgttattatgggcgtgcgcggctttaactgggggctggatttcaccggtggtacggttattgaaattacgctcgaaaaaccggctgaaattgacgtaatgcgtgatgcattgcaaaaagccggttttgaagagccgatgctgcaaaactttggtagcagccatgacatcatggtccgtatgccgcctgctgaaggcgaaaccggcggtcaggtgttgggcagccaggttctgaaggtgattaacgaatccaccaatcagaatgcagcagtgaagcgtattgagttcgtcggtccgagcgtgggggcagaccttgcgcaaaccggtgcgatggcgttgatggcagcgctgctgtctatcctcgtgtacgtaggtttccgctttgagtggcgactggcggcaggggtggttattgcgctggcgcacgacgttatcattacgctgggtattttgagcttattccatatcgagattgacctgaccattgtggcaagcttgatgagcgttatcggttacagccttaacgacagtatcgtggtaagcgaccgtattcgtgaaaacttccgcaagatccgtcgcggtacgccttacgaaatctttaacgtgtccttgacccagacgctgcaccgtaccttgatcacatccggtactaccttgatggttatcctgatgctgtacctcttcggtggtccggtactggaaggcttcagcctgaccatgcttatcggtgtttccatcggtactgcatcttccatctatgtggcatctgcgttggctctgaaactgggtatgaagcgcgaacacatgttgcagcagaaagtggaaaaagaaggggcggatcagccgagtattctgccgtaatcaagttcccgttgatgttgaaaatcccggtcagaagatcgggattttttttgatgtatggagattgcgaaaatccccgcatcttgggaaactgcgcgtaaccctacatttcatccaggtaacttttcatggctatcatcccaaaaaactatgcgcggttagaaagcggctatcgcgaaaaagcattaaaaatctatccgtgggtctgcggtcgctgttcccgcgagtttgtttattccaacctgcgtgaacttaccgttcaccacattgatcacgaccataccaataacccggaagatggcagtaactgggaattgttgtgtctctattgccacgatcatgagcatagcaaatataccgaagcggatcagtatggtacgaccgttatcgcaggggaagatgcgcagaaagatgtcggtgaagcgaagtacaacccattcgctgacctgaaagcgatgatgaacaagaagaagtgattaaaacgtaaaattgcctgatgcgctacgcttatcaggcctacgttatttcagcaatatattgaatttacgtgcttttgttggccggacaaagcgtttacgccgcatccggcatgaacaaagcacacgttgttaacaatcagaaatgccgggaataaatcccggcattttcataatcagaagttgtaacctactaccaggtaaccaccccagccggtagagcgaacgttgaagttgccgttgccgaagttcagttctgcatcgtcgttccactgaccaccgtcgtgccagtaacgagctacgacagagtagtgccagtgatcgtagttcagagccagaatatggctggaagcgatagagttattagtacgggtcttaataccgttgattgcgttaccgctgtcatcccctaaatcggaaccccagtcgaagttggtgaagccgatgtagctcagctgaccgccccacagatcggtaatcggcacaaagtatttaattttgaaacggtaaccgtcccactcgttttcgttcgctgcgccatagttctgccactggtatttcgcatagacgttcatggacaggctcatcggcaggccagtgtcgatatcggtacccagacccatgtaccaggtgctctggcgaccatctttattacgacccatgtcgtaaatgtagttgttcgcgaagtaccactctttgaacggaccgaagctaaggtcagtattggtcagcttgtcgatggagaaacgtggttcgatttccataaacagcggagaaccgtggttccagatacctttagcatcggagttaccgccgaagaataccggcgcatccgcataaccatagaagtcgaaccagtcttttttagcgaatgcttcgtactcaaggtaggtatcgttgcggatctgcggtccgaaacgggtgtgatagcttccgacaacgttaacgctctggtgccaccagtcggaaagatactgcggtttgtcgttttcagctgcgttgacagtaaaagagctagagagcgccagtaccgcaccggctgccagtaatgtttttttcatatgtatgccactgtttgaaaatcccttgcgggagtgaaaaaggcgcaaattgcgtttctaaatatttcgtatacagaggagcctattataaaaatcattgctcacaaaaatatgtttcgtttcacagttctatcatttacgtaatcgattgcgttcacgtttacacacattcgggcggggattgtactgactttcgcccttgttgcaaacttttactatcaatccaggtgatgtaagcagagtaacaaaatgacggggaaagatgttgcgggacgcacaaaatcgtcccgaaatacgtttactgcataacaggttgaatgtcgtggatacgtacaaagcctaactgatccacagaaatcccctttaactgtaacggaatatcaacatcgctgggggcgaggacgctggcaggggcattaatcaattgattctgcacattgatttcctgaaagttgtctattgttccctgaatttgcccatattcaacagttccgctgaatgcgggcaagggatcattgctctcaccctgaatacgtagtgtaagggtggtgccatctgcatcaggcgtaatattcaccaggctcatacgtaaagtaccgatctggctttccagtcttgccggtgttttcgctccaggcagaaggtaaaccccactgctggattttgcattcagcctgttttgctgagtgattttgactgtttcttgattgagttgcgtcatctcctggttcagcgtgctgacgctgtgtttcatctgtcgcacttcactttgctgcacacaggcgctaaggctgaacaggcttcccagcaggagcagtcgaaaaacgttagtattcataggtcgtccctttctcgtcgcaattagcctaatggtagagggtaaaagcagcgaaagcatcgatcctttatctcaaaagcgttgcgcctttgttgtatcgtcagttcagggtaaaatagatttccgttaaccacctggtcaggacgccgtatgcattgcccattctgtttcgccgtggacactaaggtaattgactctcgtctcgtgggcgagggtagttccgtacgccgccgtcggcagtgtctggtgtgtaatgaacgtttcaccacctttgaagtggcggagctggttatgccgcgtgttgtaaaaagcaacgacgtgcgtgaaccgtttaatgaagagaaattgcgtagcggaatgctgcgggcgctggaaaaacgtccggtgagttccgatgacgtcgaaatggcaatcaatcatattaaaagccagctgcgcgccaccggtgagcgcgaagtgccgagcaagatgattggcaatctggtgatggagcaattgaaaaagctcgataaagtcgcctatatccgttttgcctctgtctaccgcagtttcgaagatatcaaagaatttggcgaagagatcgcgcgcctggaggactaagccgtgcaggacgagtattacatggcgcgggcgctaaagctggcgcaacgaggacgttttaccacgcatcccaacccgaatgtcgggtgcgtcattgtcaaagatggcgaaattgtcggtgaaggttaccaccaacgtgcgggtgaaccacatgccgaagtacacgcgttgcgtatggcgggtgaaaaagccaaaggtgcgaccgcctatgtcacactcgaaccctgtagccatcatggtcgtacgccaccgtgctgtgacgcactcatcgccgctggcgtagcgcgcgtggttgccagcatgcaagatcctaacccgcaggtcgctgggcgtggactttaccgtctgcaacaggctggcattgacgtcagccacggcctgatgatgagtgaagccgagcaattgaataaaggctttctcaagcggatgcgcaccggctttccttatattcagttaaaacttggcgcaagccttgatggtcgcacggcgatggcgagcggcgaaagccagtggatcactagcccccaggcgcggcgtgatgtacaactactgcgcgcgcaaagtcatgccattttaaccagcagcgccacggtgctggcggatgatcctgccttaacggtgcgttggtctgaactggatgaacaaactcaggcgctctatccgcaacaaaatctccgtcagccgatacgtattgtgattgatagccaaaatcgcgtgacgccggtacatcgcattgtgcagcagcccggcgaaacctggttcgcgcgtacgcaggaagattctcgtgagtggccggaaacggtgcgtaccttgctgattccagagcataaaggtcatctggatctggttgtactgatgatgcaactgggtaaacagcaaattaacagcatctgggtggaagcggggccaacgctcgctggcgcattgctgcaggcgggtttagtcgatgagctgattgtctatatcgcacctaaactattaggcagcgacgcccgcggattatgcacgctgccagggcttgagaaattagccgacgccccccaatttaaattcaaagagatacgtcatgtaggcccggatgtttgcctgcatttagtgggtgcatgatctcccggctcgaaagggaagcagcgcacgaaatattatgctaaaatccgcccccctgcggggccatactcgaacccgaaggaagaaaatgaacattattgaagctaacgttgctaccccggacgctcgcgtcgccatcaccatcgcgcgtttcaacaactttatcaatgacagcctgctggaaggtgcaattgacgcactgaaacgtatcggtcaggtaaaagatgaaaacattaccgttgtttgggtgcctggtgcctatgagctgccgctggcggcgggtgcactggctaaaaccggtaaatacgacgcggtgattgcgctgggtacggttattcgtggtggcactgcccactttgaatatgtcgctggtggtgcaagcaacggcctggcgcatgttgcccaggacagcgaaattccggttgcttttggggttctgaccactgaaagcattgaacaagcgatcgaacgtgctggcaccaaagctggcaacaaaggtgcagaagctgcactgaccgcgcttgaaatgattaatgtattgaaagccatcaaggcctgaaattagtaaggggaaatccgtgaaacctgctgctcgtcgccgcgctcgtgagtgtgccgtccaggcgctctactcctggcagttgtcccagaacgacatcgctgatgttgaataccagttcctggctgaacaggatgtaaaagacgttgacgtcctgtacttccgtgagctgctggccggggtggcgactaataccgcatacctcgacggactgatgaagccatacctgtcccgcctgctggaagaactgggacaggtagaaaaagcagtactgcgcattgcgctgtacgaactgtctaaacgtagcgatgtgccatacaaagtggccattaacgaagcgatcgaactggcgaaaagcttcggcgcagaagacagccataagttcgtcaacggcgtactcgataaagcagcacctgtgattcgccctaacaaaaagtgatatccaggccggtagattcacggaagaccgttccatgatcgccggccttttcttttttacctgctgaggcataacgtatggcatgtggcgagttctccctgattgcccgttattttgaccgtgtaagaagttctcgtcttgatgtcgaactgggcatcggcgacgattgcgcacttctcaatatccccgagaaacagaccctggcgatcagcactgatacgctggtggcgggtaaccatttcctccctgatatcgatcctgctgatctggcttataaagcactggcggtgaacctaagcgatctggcagcgatgggggccgatccggcctggctgacgctggcattaaccttaccggacgtagacgaagcgtggcttgagtccttcagcgacagtttgtttgatcttctcaattattacgatatgcaactcattggcggcgataccacgcgtgggccattaagtatgacgttgggtatccacggctttgttccgatgggacgagccttaacgcgctctggggcgaaaccgggtgactggatctatgtgaccggtacaccgggcgatagcgccgccgggctggcgattttgcaaaaccgtttgcaggttgccgatgctaaagatgcggactacttgatcaaacgtcatctccgtccaagcccgcgtattttacaggggcaggcactgcgcgatctggcaaatagtgccatcgatctctctgacggtttgatttccgatctcgggcatatcgtgaaagccagcgactgcggcgcacgtattgacctggcattgctgccgttttctgatgcgctttctcgccatgttgaaccggaacaggcgctgcgctgggcgctctctggcggtgaagattacgagttgtgtttcactgtgccggaactgaaccgtggcgcgctggatgtggctctcggacacctgggcgtaccgtttacctgtatcgggcaaatgaccgccgatatcgaagggctttgttttattcgtgacggcgaacctgttacattagactggaaaggatatgaccattttgccacgccataaagatgtcgcgaaaagtcgcctgaagatgagtaatccgtggcatctacttgctgtcggattcggaagtggattaagcccgatcgttcctgggacgatgggcagcctggcagcgattccgttctggtatctgatgacctttttgccctggcagctctacagcctggtggtgatgctggggatctgtatcggcgtctatctttgtcatcaaacggcgaaagacatgggtgtgcacgatcatggcagcattgtctgggacgaatttattggtatgtggatcacgctcatggcgctgccgaccaatgactggcagtgggttgccgccgggtttgtgattttccgtattctggatatgtggaagccgtggccgatccgctggtttgatcgcaatgtgcatggcggcatggggatcatgatcgacgatattgtcgccggggtgatttccgcaggcatcctgtattttatcggtcatcactggccgctgggtattctgagctaattgtgcaccgatgcctgatgtgacgcttgtcacgtctcatcaggcctggactcttatttaaatcctacgacaggatgcggtttatacggcgtttccagttcggcaatctgttccggcttcaaagtgatatccaccgcgttcaatagctcatcaagctgttcttcgcggctagttccgataatcggtgcggcaatgcccggtttactcaacaaccaggccagcgcaacttgtgctcgtgtcgcccccagttcttcactgacgcctgttaaccgctctgcgatctgcgcgtcattttcatcgctttctttatagagatttttccccacctcatcagacaccagtcgtgcggtagtttctccccacggacgcgtcagacggccccttgccagcgggctccatggaattaccgccacgccctcctgataacacagtggtagcatctcgcgctcttcttcacgataaatcagattgtagtgatcctgcatactgacaaactgcgcccagccgtgctgtttttggagttccagtgcctgagcaaactggctagcgtgcatactactcgcgccgatataacgcgctttcccggcttttaccacgtcgttgagggcttccagcgtctcttcgatcggcgtgttgtaatcccagcgatgaatttgcaggatatcgacataatccatgccgagacgtcgcaggctgtcgtcgatagagcgcaaaatttgcgcacgggataatccttccggtaaatcaccaacgcgatggaacactttggtcgcaacgaccacgtcttcacgacgggcgaaatcccgcagtgcgcgaccgacgatctcttcgctgctgccgtcagaataactgttggcggtatcaaagaaatttatgccgccttccagtgcacgtttaattatgggacggctgctttcttccggcagtgtccatgcgtgattaccgcgatctggctcgccaaaggtcatacagccgaggcaaagtcgggaaacgcgaaggtcggtttttcctaaggggttgtattgcatgctgccactcctgctatactcgtcatacttcaagttgcatgtgctgcggctgcattcgttcaccccagtcacttacttatgtaagctcctggggcttcactcgtttgccgccttcctgcaactcgaattatttagagtctatgaataatttcttaagcatagcaggagtggagtagggattatgccagccaggccttgattttggcttccataccagcggcatcgaggccgagttcggcgcgcatttcttcctgagttccttgcggaataaagaagtccggcaggccaatgttcagcacgggtactggtttacgatgggccatcagcacttcgttcacgccgctgcctgcgccgcccataatggcgttttcttctacggtgaccagcgcttcatggctggcggccatttccagaattaacgcttcatcaagcggtttcacaaaacgcatatcgaccagcgtggcgttcaggctttcggcgactttcgccgcttctggcatcagcgtaccaaagttaaggatcgccagtttctcgccacgacgcttcacaatgcctttgccaattggtagtttttccagcggcgtcagttccacgccgaccgcgttgccacgcgggtagcgcaccgcactcgggccatcgttatagtgatagccggtatagagcatctggcgacattcgttttcatcgctcggggtcataatgaccatttccggtatgcagcgcaggtaagagagatcaaaagcaccctgatgggtttgaccgtcagcaccaacaatgcccgcgcggtcgatggcgaacaggaccggaagcttttgaatcgccacgtcatgcagcacctgatcataggcgcgttgcaggaaagtggagtaaatcgcgacaatgggtttgtacccaccaatcgccagacccgcagcaaaggtcaccgcgtgttgctcggcaattgccacgtcgaagtagcgatccgggaatttacgactaaactcgaccatgccggaaccttcacgcatcgccggagtaatcgccatcagcttgttgtctttcgctgccgtttcgcacaaccagtcgccaaagattttactatagctcggcaaaccgccgctacttttcggcaaacaaccgctggagggatcaaatttaggcacggcgtggaaagtgatcgggtctttttctgccggttcataaccacgaccttttttggtcatgatatgcaggaactgcgggcctttcaggtcgcgcatgttctttagcgtggtgataagccccagcacatcgtgaccgtccaccgggccgatgtagttaaagcccagctcttcaaacaacgtgccaggcactaccatgcctttaatatgttcttcggtgcgtttgagcagctctttaattggcggcacgccagagaaaacttttttcccgccttcgcgcagactagagtaaagcttaccggaaagcagctgtgccagatggttgttgagcgcgccgacattttcggaaatgctcatttcattgtcgttgagaatcaccagcatatcaggacggatatcgcccgcgtgattcatcgcttcaaacgccatgcctgcggtaatcgcgccatcgccaatgacacagacggtgcggcgatttttgccttctttttcggcagcaaccgcaataccaattccggcactgatggaggtactactatgcccgacgcttaatacgtcatattcgctttcgccgcgccacgggaacgggtgcagaccgcctttctgacggatggtgccgattttgtcgcggcgtccggtcaaaattttatgcggataagcctgatgccccacatcccaaatcaattggtcaaacggggtgttgtagacatagtgcagcgccacggtcagttcgaccgtgcccagcccggaggcgaagtgcccgctggaacggctcacgctgtcgagtaaatagcggcgcagttcgtcgcagagtttcggtaaactctctttcggcaacagtcgtaactcctgggtggagtcgaccagtgccagggtcgggtatttggcaatatcaaaactcatcaggggcctattaatacttattgtttatttattacgctggatgatgtagtccgctagcgcttccagtgcgctggtatcgagactctgttcagccagttgtttcaggctctgacgggcatcgtcgatcagatcccgggctttcttccgggcttgctcaagacccagaagtgcagggtaggtacttttaccaagttgctggtcggcaccctggcgttttcccaacgttgcagtatctcccaccacatccaggatgtcatcctgaacctggaaggcaaggccgatgctctctgcatacttgtcgagtaccggcagagcacgacgtcctttatctccggcgcttaatgcaccaaggcgaacggcggcgcgaatcaatgcgccggttttatgacgatgaatacgctcaagcgcgtccagaggtacgtgtttgccttccgcgtctaaatctaatgcctgaccaccgcacattccggcaataccactggcgctcgccagttcagaaatcatgctaattctgtcgcggtcgctcacttccggcatatcggcatcgcttaaaatgctgaacgccagcgtttgtaaagcgtcgccagcgagaatcgcgtttgcttcgccaaacttcacatggcaggttggcaaaccgcgacgcagatcgtcatcatccattgccggtaaatcatcatgaattaaactgtaagcgtggatacactcaacggcggcagcgggtgcgtccagcgtgtttgtgctaacgccgaacatatgaccggcggcataaaccaggaaaggtcgcaggcgcttaccacctaataatgcgccatactgcatggtttcgaccacgggagtgttctgaaagggcagtggggcgataaaacggctcagcgcctggttggcctgcttaacgcaggcttcgagttgctgcggaaagtccattactcattgtccggtgtaaaaggggttagagaggcgtcttcattgtcagacagcagaatttgtacgcgctgttcggcttgttgtaatttggcctgcccctgacgtgccagctgcacgccgcgttcgaactcgttcagcgcctcttccagcggcaggtcgccactttccagacgggttacaatctgttccagctcgctcagcgccttttcaaagctggcgggcgcctcatttttcttcggcataatgaatgtctgactctcaatatttttcgccccgtcatggtaacggactcagggcaaatagcaaataacgcgcaatggtaaggtgatgtgcacagcaaagcgatgttagtggtatacttccgcgcctggatgcagccgcaggtgtgggctgctgtatttttccctatacaagtcgcttaaggcttgccaacgaaccattgccgccatgaagtttatcattaaattgttcccggaaatcaccatcaaaagccaatctgtgcgcttgcgctttataaaaatccttaccgggaacattcgtaacgttttaaagcactatgatgagacgctcgctgtcgtccgccactgggataacatcgaagttcgcgcaaaagatgaaaaccagcgtctggctattcgcgacgctctgacccgtattccgggtatccaccatattctcgaagtcgaagacgtgccgtttaccgacatgcacgatattttcgagaaagcgttggttcagtatcgcgatcagctggaaggcaaaaccttctgcgtacgcgtgaagcgccgtggcaaacatgattttagcagcattgatgtggaacgttacgtcggcggcggtttaaatcagcatattgaatccgcgcgcgtgaagctgaccaatccggatgtgactgtccatctggaagtggaagacgatcgtctcctgctgattaaaggccgctacgaaggtattggcggtttcccgatcggcacccaggaagatgtgctgagcctcatttccggtggtttcgactccggtgtttccagttatatgttgatgcgtcgcggctgccgcgtgcattactgcttctttaacctcggcggcgcggcgcatgaaattggcgtgcgtcaggtggcgcattatctgtggaaccgctttggcagctcccaccgcgtgcgttttgtcgctattaatttcgaaccggtcgtcggggaaattctcgagaaaatcgacgacggtcagatgggcgttatcctcaaacgtatgatggtgcgtgccgcatctaaagtggctgaacgttacggcgtacaggcgctggtcaccggcgaagcgctcggccaggtgtccagccagacgctgaccaacctgcgcctgattgataacgtctccgacacgctgatcctgcgtccgctgatctcttacgacaaagagcacatcatcaacctggcccgccagattggcaccgaagactttgctcgcacgatgccggaatattgtggtgtgatctccaaaagcccgacggtgaaagcagttaaaagcaagattgaagcggaagaagagaagttcgacttcagcattctcgataaagtggttgaggaagcgaataacgttgatatccgcgaaatcgcccagcagaccgagcaggaagtggtggaagtggaaaccgtcaatggcttcggcccgaacgacgtgatcctcgatatccgttctatcgatgaacaggaagataagccactgaaagtcgaagggattgatgtggtttctctgccgttctataaactgagcaccaaatttggcgatctcgaccagaacaaaacctggctgctgtggtgtgagcgcggggtgatgagccgtctgcaggcgctctatctgcgcgagcagggctttaacaatgtgaaggtatatcgcccgtaatttgtggtttttacgtcgcatctggtcagatgcgacgtttgccgcatccgacattactcgtaataattataaatccctgccgccatcaccagttgacttgccacttcatgggctttttcacgcccaaccaacaggtcgataattttcagaccaaagtcgatagctgtacccggcccctggctggtcagcaattttacccgtgcatcccagacgacgcgcttgtccagccattgttcggcgggaattttgtctttcagcgtcgggaagccggtcatattaccaatcgggaagatatcgtgcggcaccagcacggtggctggcgcggcgcaaatagccgcgacgatacgcccggaacggtggaactgtttaacggtttcaaccagcagagtgctatcgcgaaaacactccgcgcctttaatgccaccaggcagcacgatcacgtcatattcgccatcagccacttcgaccagcggcgcatccgccagcagcttcacgccgcggctgcaggtaatcgccaggttaccatcgctggcgacgctggcagtggtgactttgataccgccgcgaaccagcagatcgatagtggtgacggcttcagtctcttcactaccaggggcgaggcaaaccagtgcgcttgcgctcatattcactctcctttctttttttaattaccaggggcgaggcaaaccagtgccgatgcgctcatattcactctcctttctttttaccatttcaaacaggcgggtgttttccggtacggcaatcccatgcgcgcgggcgcggcgtaagagaaaaccattgatatagtcgatttcagtgtggcgcagcgcgcggatatcctgcaacatgctgctgatattttccgctgtggcatcaatcacctgcatcacgtaatcacgcaaatcttctgcactagtatgatgcccttcgcgttcgatcaccgccgcgacttcttcgcatatctgcataatttcttgcggatgatgacgtaattcaccgttcgggcaattccagatggcagtcagtggattaatcacgcagttgactgccagcttgcgccacagctcggcgcgaatattgttatgccaggcaacgtcaggcaacacggtttgcaaaatatccgccagataactgtaatccccgtcctgttgccgtgccgggccaatatgcgtgataccgtttgccacatgaataatgacattgccgtcgcggcgggctgcatgggtggtggtgcccatcagtaatggctgctgaatgttttgcaactcttcgatggtgcccatgccgttgtgaattaacagtattggcgtagttacaggcagtgtggacgcgaggcttttgacggcatcggaaacctgccatgctttcagcgtcaccaggagcagatcgctggtggcgagaaaatcgggatcgttggcggtcaggctttcgttaaatatgctaccatctgtctcaaccagattcacgctacaataaggttgcggtacgcgcagccagccctgaacttcatgaccctgtttgcaaagtgctgtaagccataattgccctaaggcaccgcatcccaatacggtaattttcattgttcctcctcacccgcaaccactccgggtgttcaataaggctatcccttaattgtgcatgctgttgcgactatgcacaattaagggatacgtcctggtgcaggactgtcggttatttaactttgcgggtattatgcttcgcatcaaaaatgaagggagaggaaaagatgccatctttcgatattgtctctgaagttgatcttcaggaagcacgtaacgcggtcgataacgcgagccgcgaagtggagtcccgttttgacttccgtaacgttgaagccagttttgagctgaacgacgccagcaaaaccatcaaagtgttgagcgagtccgatttccaggtcaatcagttgctggatattctgcgtgccaagctgctgaagcgcggcattgaaggcagtagcctggatgtaccggagaatatcgttcatagcggtaaaacctggtttgtggaagcgaaactgaaacagggcattgagagcgcgacccagaagaaaatcgtcaagatgatcaaagacagcaaactgaaagtgcaggcgcaaattcagggcgatgaaatccgcgtaacgggcaaatctcgtgatgatttgcaggctgtcatggcgatggtacgtggtggcgatctcggtcagccgttccagttcaaaaacttccgcgattaatcgcgactatgtgcgttttgttcatgtcagatgcggcatgaacgcctgattcggcctacaaaggtttgtaattcagaaactttgtaggcctgataagcgtagcgcagcaggcaattcgccgcgttttttatgcctgacgaattgcctgttctatctcaaagcgattcgtcactttgctgtcgattttcacataagcactatgttcttcttctgcaatcaacacttctttgatgccttcagtttctagcaaacgcacttttaacgcctcgtttgcggcaatgttcgccgggatttcaatgcgcaaactgctgacatacggcggttctttcatggtactggcgactgtcagccacactgcggccagcattgcgccagcgagaaataccccctgaccgtcaaacatgccgttaatccagccgcccaggctaccgccaatcgccacgccaagaaactggctggtggagtaaacacccatcgccgtacctttgtaacctgctgggctctctttactgataagactgggcaggagggcttccatcaaattaaacgccacaaagaaaagctgcacgccgaccaccagttgccagaactgcgtttgcgcgttccacaacacaatttccgcaaccacgatcaacccgacgcagaagacaaagacttgcttcattttgcgcttaacttcagcgtagataatgaaaggcacgacgctgccaaaggcgattagcattgtcgccagatagaccttccagtgttcagccgccgggaaccctgcatcagccagttgtccgggcagggcaacaaacgtgctcatcagcaaaatatgcagacacataatgccaaagttgagtttcagcagccgcggttccgccagcactttactgaaactgcctttcaccattccggactcacgattaagtacgtgagtgctactgttgggcacaacccaaatggtcaacgcaatgccggtcgttgccagaatagcgatcatccagaacagcgcgtgcagcccaagtttgtgagtgatgatcgggccaagcaccatcgcaatggcaaaggtaatgccaaagctcacgccgataaacgccatcgctttggtgcggttttgttcgcgcgtgagatcggaaagcagcgccataacggcggcggcaattgctccagagccttgtagcgcccggcccagaataattccccagatggagtcggaaagcgcagcgataacgctaccggcggcaaacaccgccagcccaccgacaattaatggtttgcgaccaatgcggtcggaaagcaggccaaacggaatctgaaaaacggcctgagtcagaccataaataccaatggcaataccgattaatgcttcgctggcaccttgcagagccatgccgtacgtggtcagaaccggcagaaccataaacatgcccagcatgcgcaagctgaatacggtccctaaaccccaggtcgcgcgcctctcacctggcgtcattttataatcgttcattaccacctctgttttaaattcgcgactagtgtaaagcggcaaacgaatggggtaaacatgcggattttttagtaaatatttcgagagggatatgtttctaatgctaagaaaaaaggtgccgtagcacctttttaatagagaggttttgttaccacacagcagccagcagcgtatggctgtccggtaccataaaatcaacggacatcatcacgctgagggcagtgatggcgatgatagagaagccgaacagcttgcgcgcccagattctgtcatcagcaactttataaccgcgcagagccatacctaaccaccagacgctaaccgccgcggcgaccaccagatatttatacccagcgtaaccgccaagagagagcatcagcgtggcaacggcaaaggcgatgatatacagcgtgatgtgattcttcgccacgctaatgccttttaccactggcaataccggaatgtttgccgcctggtaatccttaaagcggaaaatggcgatggcataggagtgaggcatctgccacaggctgaagatagccagcaggatcgctgcgccgctatcgaactcaccggttaccgcacagtagccgatcaccggcggcgcagcgccggagaggctaccaatcaacgtgccgtagacagagtggcgtttcatgtacaggctataaacgccgacataaaccacaaagcccatcacccccagccagcaggccagcggattcgcgccaaaccacagcagcataaagccagcaatacccagcaacgtggcgtacaccaggctgacagcaggagagatcaggcctttcaccagcacccgattcttcgtcctttccatctttctgtcgatatccctgtcgatgtagttgttaaacacacaaccgctcgccacaaccagactcaccccaaccagcgtgtagataaacaggggataatcaatgctgcccttactggccagcaggaatcccccaatcacgctgatcaggttgccaaagatgatgcctggtttcgttacttgcaggtattgcttaaacatcataaccgccgctcttagtgcatcatcatgttgtagttgaggttccacataatccagatggagcctacaaccaggatagcgatgattagcacggtgaagacaaacgccgtcatgttccagccttcatcacttttggtattcatgtgcaggaagcacaccagatgcaccagaacctgtaccactgccattgccaggattgttcccagaattacggccggagaggcagctcctgtcatcaccatccagaacggaatcaccgtcagaatgatgctcaggataaagcctgtcatgtaggtttttacgctgccatgggacgcgccgctgtgatcggtagaatgactcattacatcgcccccatcagataaacaacagtgaacacacagatccaaaccacatccaggaagtgccagaacaggctcaggcacatgatgcgggtacggttagtgctggtcaggccgcgacgggcgatttgcaccatcagcaccgccatccagataagaccagaagtgacgtgcagaccgtgcgtgccgaccagcgcaaagaacgcactcaggaagccgctgcgatccggacccatgccgttaacaatcaggtgatggaattcatagatttccatcccgataaatccggcaccaaacaaccaggtcaacgccagccaggagataacctggcttttgttgtttttgtacatggcgatagccgccatgccgtaggtgatggagctgaacaacagcaagaaagtttcaaccagaacgaacggcagttcgaaaatgtccttacctgtcgggccgcctgcggtgccgttcaccagaacggcataggtagcaaacaagatagagaacagaatgcagtcgctcatcaggtagatccaaaatccgaagattttggttccgcctgcatcgtggtgcccgtgttcgtgcgcgtgggcagtcgcgtgcgtcaaagtatcagttgccatttttcagccctgccttagtaatctcatcgaaatgctggttttccagtttttcgatttctgccaccggcacgtagtaatccacgtcctcgtcgaagcttttcacgatccaggtgatgatcatgcctgcgaagccaacaatcgccagccaccagatatgccagatcatggcgaaaccgaagatggtggagaaagctgcaatgacgatacctgcaccgctgtttttcggcatatgaatttcttcatagtggtcaggctttttatacgcttcgcctttctctttcatttcccagaatgcatcacgttcgtgaacgtgcggcactacggcaaagttatagaacggaggcggggaagaggttgcccactccagcgtacggccaccccacgggtcgccagtcaggtcacggttctggtcgcggtcgcgaatagaaacgtacatctgaataacgaggcagagaatacccagcgcaatcagtactgcaccgctggctgcaatcatcagcatggtgtggaactgcgggtcaatctgctggctcaaacgacgggtcatgcccatgaagcccagcgcatacagtggcataaaggcaacgaagaagccgatgatccagaaccagaacgcgcgtttaccccaggtttcgttcagtttgaaaccgaacgctttaggccaccagtaggtcatccctgcgaagcagccgaagaccacgccgccgatgatcacgttatggaagtgcgcaatcaggaacaggctgttatgcagaacgaagtccgcgcccggtacggccagcagcacgccagtcatcccgcccacgctgaaggtgacgataaaaccgatggtccacagcatcgcagaatggaacacgatgcggccctgatacatggtgaacagccagttgaagatcttcaccccggtcgggatggcgataatcattgtggtgataccaaagaaggcgtttacgttcgcgcccgcacccatcgtaaagaagtggtgcagccaaacgatgaagctcagcacggtgatacaggcggttgcccataccaggctggtataaccaaacagacgtttacggctgaaggttgccgcaatttcggagaacacaccgaaaacaggcaggatcaggatgtaaacttccgggtggccccaggcccaaatcaggttgatgtacatcatcatgttgccacccatatcgttggtaaagaaatgggtgcccagatagcgatccagggtcaacaacgcgacggtaaccgtcagaattgggaaggaagcaataatcagtacgttcgcgcacagacttgcccaggtaaatactggcatcttgaacatggtcatgcccggtgcgcgcatcttcagaatggtaacgaagaagttgataccggtaagcgtcgtacctataccggatagctggagactccatatccagtaatcgacaccgactcccggactgtactctattccgcttagcggtggataggccagccagccggtctgcgcaaattcgcccacgccgagagaaacgttaaccagaatcacaccaacaacggtaaaccagaagcttaagttgttgaggaacgggaacgcaacgtcacgcgcgccgatctgcagcggaaccaccaggttcatcagaccgataacgaaaggcatcgccacgaagaagatcataatcacgccgtgcgcggtaaagatctgatcgtagtggtgaggtggcaggaagcccgcttcgcccgcgctggcaagagcctgctggctacgcatcataatggcgtcagcaaaaccacgcagcaacatcacaatcgccacgatgatatacatgataccgaggcgtttatggtcgacggaggtcagccactctttccacaggtaggtccacttaccgaagtaagtgatcaggccaacgagcgccagacctcccaaaataatgccagcgatcgtaaccatgacgataggttcatggaacgggactgcatcaagacttaattttccgaacatctttattcttcctcaacccctttaatgggcggattccgcgtggctcatgtccatgccttccataccttcgtgtgcgctgtgctcaccttctggctgggtcatgtccatgctcttaccgtgagccataaacttgttaattacatcggcaaacaagtctggtttcacgttggagaaatattccacctggttgtattcgctaggcgcggccagtttttcgaacgcagccatgtcagacatggtgttcgggctctgcttcgcttttgcgacccactggtcgaatgcggcgcgatccggtgttgcaatagctttgaacttcatgccactgaagcccgggccgctgtagctggcggagataccgtcataagtgccgggttcgttggcgatcagatgcaggcgagtctgcataccggccatggcataaatctggctacccagacgcggaatgaagaaggagttcatcacggagttggaggtcactttgaagtacaccggagtgttcgccgggaaagcgatttcattcacggtagcaatgccctgttccgggtagatgaagaaccatttccagtccatggaaaccacttcgatggtaatgggcttctcgtcgtgtgccagcggcttgctaggctcaagagcgtgagtggttttccaggtcagtactgcaaggaagatgatgattaagataggtaccgtccagaccacagcttccactttattggagtgactccagttcgggctgtacttagcatctttattgctcgcacggtacttccaggcgaaaccaacagccatcaagattgcgggaataacgacaatcaacatcaggccaaatgccgtcagtatcagactacgttgctccagaccaatctgtcctttgggatctaacagcgcagaattacagccactgagcaatacagtgcctgcaaataaactcaaccatcccaaacttttattgtatttcctgagtctcatttaacgacctcaattccacgggatctggtggcgtttaaagtgtgtgggcattttacgggaaggttacattactgtaaacatgattaaattcctgttacttggatttggctgccaggtcacatatgttgcaaaacatatcaggttgattttaagaagctgttgcaaaagggcgttataacaaaaggggagtgctgaaggagtctgggcgggcaattggtataaccaatgtgaaataaaacaattatttaacaaataattatcattagagtgacaactgggtgatgagaaaataaagactcattagctgaatcgtgtaagaaaaatagaatttataaatggcgccaataatttccaaacgctaagccgcacaaaagaacaaatattaataagcgatactgatgtttatttagccgtaataattacggcgagtgattactacagctaaataatatttacagattacgtcagatgcgtttttcgtagcgccagataatccagcaaaccaccaagcacgacgccagaaagggcgactaaaaccccgacttccagcagagcaggcaggaaagagaagtgcgtcaaatccagcgcgtccatcgtcaatagcagtaaccacacggccaacaggctgacgcccgccgccagtgtccacatggcaaaggcataacctgccggatatgcggtacgggagataaagttgtcatttactcgtgtatattcaagcgtctggcggcaaaccagcagcaaaataagccctggtacggcagcggcgacggagaatagatagaatgtgctccagccgtgtgcttcaacaaaccaacccgccacggggccgacataaactcgccctacagcagaaagcgcactgagcagggcaaattgagtagcggaaaaactcttattacatagcgtcattaacagcgcgacaaaggcacttgtgcccatcccgccacagaggttttcgaaaaagacggctgcgcccatgctgtagagatgcttatcagtaatgctcagcagccagtaaccggcgttagacgcaccttgtaaaatgccgaaaatcagcagtgcccggaacagactcaggcgctgcatcaaaatcccaccgtacaatgcgccaacaatggtcgctagtaagccaagcgttttgttaaccacgcctacttcacccgcatcaaacccgacgccgcgaatcaaaaacgtggttgtcaggctcatggcgaatgcgtcgcccagcttatacagcacgataagaagcaaaataagccaggcattattgcgaccaaagaaatctcgcagaggtgcaacaaccgcttgttccagcgttttgggcacaggaatggtgtcggttggttctggtgcaagcaacgtcgcgataatacaggggatcaacagtgccgccattaaccagtacatgccctgccagcccagccatttatctgccagccacagggctaggccgccggaaaccagcatccctaaacggtaacccagcacgctgattgccgcgcccgcaccacgttcttctgccggaagcacatcggttttccacgcatcgaagactatatcctgggaagcagagcaaaaagcgatcaccactgccagcgccgccatccagcggagttgggtgcctggttcgagaaaacccatcgccgcaatggcgactaataacaggatttgcgtggcgagcagccaaccgcgccgccgcccaaaaaatggaggcgtgtagcggtccatcagcggactccagaggaatttaaaaacgtaagcctggcctaccagagagaagaaaccaatggttttgagatcgatattctcgaccgtcatccaggcctgtaaggtaccggatgtcagggcgagcggtagcccggaagcaaaacccaggatcagcaatatggcactacgcggctgttgaaaaatacgtaaatattgactggacatgggcgtctacaggcccggcttgcaccgggccagagggcagaaattaacgcgcgttctgcttgatgaattcgtggatgctggtgtcctgagacatatcagcgatggtatcggtcagcacactgttaaccgcatcggcgatatttttgttggaggcctggaacgcaccttcaacgttgtagctggcacgatagtttttggtcattttgttgccattctgcgcggtagcgatgatggcgatatccgctttggtcgcgatgttgtagcgcacgttgccctgggacacgtcagcatacagttggctaacgatgatttgcagattaaccgggccattcggaccaaccatgtaaccacgcgcggtcatctgtttttccagcacttcttgcagcaggaaacgcagatcgcgggaggcggtcagggtaacgatttgattatcgcgggtgacttttgccagcgcctgatcggtacgctgatcggcaccattaatgcttacggtgacgcccatcaggcttggatcctgctgtggcagtgtaatcgtcggggaaacttcaatagttgttggcggttttgcgcatcctgcaagcataaacagagcaactaacgggaagaggatttttttgaacatgttcgggctctcagagactcttaagcgtgtttggtaaaaattcccgccatcataacattgccaacggcgaggggaagtgggtaaggcatgtaaattcatcatgttgacgaaataatcgcccctggtaaaagaaacactgatgcgaggcctgtgtttcaatctttaaatcagtaaacttcatacgcttgacggaaaaaccaggacgaaacctaaatatttgttgttaagctgcaatggaaacggtaaaagcggctagtatttaaagggatggatgacatctcagcgttgtcggaggagatatttcatgatgatacgtgagcggatagaagaaaaattaagggcggcgttccaacccgtattcctcgaagtagtggatgaaagctatcgtcacaatgtcccagccggctctgaaagccattttaaagttgtgctggtcagcgatcgttttacgggtgaacgttttctgaatcgtcatcgaatgatttacagtactttagcggaggaactctctactaccgttcatgcgctggctctgcatacttacactattaaggagtgggaagggttgcaggacaccgtctttgcctctcctccctgtcgtggagcaggaagcatcgcgtaaaaacgcatttgcaactgtcggcgcttttccagtatgttgctaaagattttatgaaaaacggcctgcgggccgttttgttttgtctggattttgcgctttttgcccagcattcagacgaaaattgcccgggaattgtgaaaaaatacgcgacagcgcgcaataaccgttctcgactcataaaagtgatgccgctataatgccgcgtcctatttgaatgctttcgggatgattctggtaacagggaatgtgattgattataagaacatcccggttccgcgaagccaacaacctgtgcttgcggggtaagagttgaccgagcactgtgattttttgaggtaacaagatgcaagttagtgttgaaaccactcaaggccttggccgccgtgtaacgattactatcgctgctgacagcatcgagaccgctgttaaaagcgagctggtcaacgttgcgaaaaaagtacgtattgacggcttccgcaaaggcaaagtgccaatgaatatcgttgctcagcgttatggcgcgtctgtacgccaggacgttctgggtgacctgatgagccgtaacttcattgacgccatcattaaagaaaaaatcaatccggctggcgcaccgacttatgttccgggcgaatacaagctgggtgaagacttcacttactctgtagagtttgaagtttatccggaagttgaactgcagggtctggaagcgatcgaagttgaaaaaccgatcgttgaagtgaccgacgctgacgttgacggcatgctggatactctgcgtaaacagcaggcgacctggaaagaaaaagacggcgctgttgaagcagaagaccgcgtaaccatcgacttcaccggttctgtagacggcgaagagttcgaaggcggtaaagcgtctgatttcgtactggcgatgggccagggtcgtatgatcccgggctttgaagacggtatcaaaggccacaaagctggcgaagagttcaccatcgacgtgaccttcccggaagaataccacgcagaaaacctgaaaggtaaagcagcgaaattcgctatcaacctgaagaaagttgaagagcgtgaactgccggaactgactgcagaattcatcaaacgtttcggcgttgaagatggttccgtagaaggtctgcgcgctgaagtgcgtaaaaacatggagcgcgagctgaagagcgccatccgtaaccgcgttaagtctcaggcgatcgaaggtctggtaaaagctaacgacatcgacgtaccggctgcgctgatcgacagcgaaatcgacgttctgcgtcgccaggctgcacagcgtttcggtggcaacgaaaaacaagctctggaactgccgcgcgaactgttcgaagaacaggctaaacgccgcgtagttgttggcctgctgctgggcgaagttatccgcaccaacgagctgaaagctgacgaagagcgcgtgaaaggcctgatcgaagagatggcttctgcgtacgaagatccgaaagaagttatcgagttctacagcaaaaacaaagaactgatggacaacatgcgcaatgttgccctggaagaacaggctgttgaagctgtactggcgaaagcgaaagtgactgaaaaagaaaccactttcaacgagctgatgaaccagcaggcgtaatttacgcagcataacgcgctaaattcgcacaaaggcccgtcaccgccaggtggtgggcttttttttgtcatgaattttgcatggaaccgtgcgaaaagcctctttcggtgttagcgtaacaacaaaagattgttatgcttgaaatatggtgatgccgtacccataacacagggactagctgataatccgtccataaggttacaatcggtacagcaggttttttcaattttatccaggagacggaaatgagttacagcggcgaacgagataactttgcaccccatatggcgctggtgccgatggtcattgaacagaccagtcgcggtgagcgctcttttgatatctattctcgtctacttaaggaacgcgtcatttttctgactggccaggttgaagaccacatggctaacctgattgtggcgcagatgctgttcctggaagcggaaaacccagaaaaagatatctatctgtacattaactccccaggcggggtgatcactgccgggatgtctatctatgacaccatgcagtttatcaagcctgatgtcagcaccatctgtatgggccaggcggccagcatgggcgctttcttgctgaccgcaggggcaaaaggtaaacgtttttgcctgccgaatagccgcgtgatgattcaccaaccgttgggcggctaccagggccaggcgaccgatatcgaaattcatgcccgtgaaattctgaaagttaaagggcgcatgaatgaacttatggcgcttcatacgggtcaaagtttagaacagattgaacgtgataccgagcgcgatcgcttcctttccgcccctgaagcggtggaatacggtctggtcgatagcattctgacccatcgtaattgatgccagaggcgcaactgtgccgctatacttatccagggcggcacaacgctgtaagcggcttgcgcctgagaatggcatttgcgtcgtcgtgtgcggcacaaagaacaaagaagaggttttgacccatgacagataaacgcaaagatggcagtggcaaattgctgtattgctctttttgcggcaaaagccagcatgaagtgcgcaagctgattgccggtccatccgtgtatatctgcgacgaatgtgttgatttatgtaacgacatcattcgcgaagagattaaagaagttgcaccgcatcgtgaacgcagtgcgctaccgacgccgcatgaaattcgcaaccacctggacgattacgttatcggccaggaacaggcgaaaaaagtgctggcggtcgcggtatacaaccattacaaacgtctgcgcaacggcgataccagcaatggcgtcgagttgggcaaaagtaacattctgctgatcggtccgaccggttccggtaaaacgctgctggctgaaacgctggcgcgcctgctggatgttccgttcaccatggccgacgcgactacactgaccgaagccggttatgtgggtgaagacgttgaaaacatcattcagaagctgttgcagaaatgcgactacgatgtccagaaagcacagcgtggtattgtctacatcgatgaaatcgacaagatttctcgtaagagtgacaacccgtccattacccgagacgtttccggtgaaggcgtacagcaggcactgttgaaactgatcgaaggtacggtagctgctgttccaccgcaaggtgggcgtaaacatccgcagcaggaattcttgcaggttgatacctctaagatcctgtttatttgtggcggtgcgtttgccggtctggataaagtgatttcccaccgtgtagaaaccggctccggcattggttttggcgcgacggtaaaagcgaagtccgacaaagcaagcgaaggcgagctgctggcgcaggttgaaccggaagatctgatcaagtttggtcttatccctgagtttattggtcgtctgccggttgtcgcaacgttgaatgaactgagcgaagaagctctgattcagatcctcaaagagccgaaaaacgccctgaccaagcagtatcaggcgctgtttaatctggaaggcgtggatctggaattccgtgacgaggcgctggatgctatcgctaagaaagcgatggcgcgtaaaaccggtgcccgtggcctgcgttccatcgtagaagccgcactgctcgataccatgtacgatctgccgtccatggaagacgtcgaaaaagtggttatcgacgagagcgtaattgatggtcaaagcaaaccgttgctgatttatggcaagccggaagcgcaacaggcatctggtgaataattaaccattcccatacaattagttaaccaaaaaggggggattttatctcccctttaatttttcctctattctcggcgttgaatgtgggggaaacatccccatatactgacgtacatgttaatagatggcgtgaagcacagtcgtgtcatctgattacctggcggaaattaaactaagagagagctctatgaatcctgagcgttctgaacgcattgaaatccccgtattgccgctgcgcgatgtggtggtttatccgcacatggtcatccccttatttgtcgggcgggaaaaatctatccgttgtctggaagcggcgatggaccatgataaaaaaattatgctggtcgcgcagaaagaagctagtacggatgagccgggtgtaaacgatcttttcaccgtcgggaccgtggcctctatattgcagatgctgaaactgcctgacggcaccgtcaaagtgctggtcgaggggttacagcgcgcgcgtatttctgcgctctctgacaatggcgaacacttttctgcgaaggcggagtatctggagagcccgaccattgatgagcgggaacaggaagtgctggtgcgtactgcaatcagccagttcgaaggctacatcaagctgaacaaaaaaatcccaccagaagtgctgacgagcctgaatagcatcgacgatccggcgcgtctggcggataccattgctgcacatatgccgctgaaactggctgacaaacagtctgttctggagatgtccgacgttaacgaacgtctggaatatctgatggcaatgatggaaagcgaaatcgatctgctgcaggttgagaaacgcattcgcaaccgcgttaaaaagcagatggagaaatcccagcgtgagtactatctgaacgagcaaatgaaagctattcagaaagaactcggtgaaatggacgacgcgccggacgaaaacgaagccctgaagcgcaaaatcgacgcggcgaagatgccgaaagaggcaaaagagaaagcggaagcagagttgcagaagctgaaaatgatgtctccgatgagcgcagaagcgaccgtagtgcgtggttatatcgactggatggtacaggtgccgtggaatgcgcgtagcaaggtcaaaaaagacctgcgtcaggcgcaggaaatccttgataccgaccattatggtctggagcgcgtgaaagatcgaatccttgagtatcttgcggttcaaagccgtgtcaacaaaatcaagggaccgatcctctgcctggtagggccgccgggggtaggtaaaacctctcttggtcagtccattgccaaagccaccgggcgtaaatatgtccgtatggcgctgggcggcgtgcgtgatgaagcggaaatccgtggtcaccgccgtacttacatcggttctatgccgggtaaactgatccagaaaatggcgaaagtgggcgtgaaaaacccgctgttcctgctcgatgagatcgacaaaatgtcttctgacatgcgtggcgatccggcctctgcactgcttgaagtgctggaaccagagcagaacgtagcgttcagcgaccactacctggaagtggattacgatctcagcgacgtgatgtttgtcgcgacgagcaactccatgaacattccggcaccgctgctggatcgtatggaagtgattcgcctctccggttataccgaagatgaaaaactgaacatcgccaaacgtcacctgctgccgaagcagattgaacgtaatgcactgaaaaaaggtgagctgaccgtcgacgatagcgccattatcggcattattcgttactacacccgtgaggcgggcgtgcgtggtctggagcgtgaaatctccaaactgtgtcgcaaagcggttaagcagttactgctcgataagagtttaaaacatatcgaaattaacggcgataacctgcatgactatctcggtgttcagcgtttcgactatggtcgcgcggataacgaaaaccgtgtcggtcaggtaaccggtctggcgtggacggaagtgggcggtgacttgctgaccattgaaaccgcatgtgttccgggtaaaggcaaactgacctataccggtagcctcggcgaagtgatgcaggagtccattcaggcggcgttaacggtggttcgtgcgcgtgcggaaaaactggggatcaaccctgatttttacgaaaaacgtgacatccacgtccacgtaccggaaggtgcgacgccgaaagatggtccgagtgccggtattgctatgtgcaccgcgctggtttcttgcctgaccggtaacccggttcgtgccgatgtggcaatgaccggtgagatcactctgcgtggtcaggtactgccgatcggtggtttgaaagaaaaactcctggcagcgcatcgcggcgggattaaaacagtgctaattccgttcgaaaataaacgcgatctggaagagattcctgacaacgtaattgccgatctggacattcatcctgtgaagcgcattgaggaagttctgactctggcgctgcaaaatgaaccgtctggtatgcaggttgtgactgcaaaataatgacctcgcgcaaaatgcactaataaaaacagggctggcaggctaattcgggcttgccagcctttttttgtctcgctaagttagatggcggatcgggcttgcccttattaaggggtgttgtaaggggatggctggcctgatataactgctgcgcgttcgtaccttgaaggattcaagtgcgatataaattataaagaggaagagaagagtgaataaatctcaattgatcgacaagattgctgcaggggctgatatctctaaagctgcggctggccgtgcgttagatgctattattgcttccgtaactgaatctctgaaagaaggggatgatgtagcactggtaggttttggtacttttgccgttaaagagcgtgctgcccgtactggccgcaacccgcagaccggtaaagagatcaccatcgctgctgctaaagtaccgagcttccgtgcaggtaaagcactgaaagacgcggtaaactaagcgttgtccccagtggggatgtgacgaagttcaagggcgcatctactgatgtgccttttttatttgtattcggtgactttctgcgtcttgtgggctgacaattgcccccgtttcttgtcacaataggcctttgcgcgcatcgatacgttgcgtgaggtacacagtcatctacagcggagtgttgttacaccatgatggacagcttacgcacggctgcaaacagtctcgtgctcaagattattttcggtatcattatcgtgagcttcatattgaccggcgtgagtggttacctgattggcggaggcaataactacgccgcaaaagtgaatgaccaggaaatcagccgtgggcaattcgagaacgccttcaacagcgagcgtaatcgcatgcagcaacagctgggcgatcaatactccgagctggcagcgaacgaaggctatatgaaaaccctgcgtcaacaggtgctgaatcgtctgatcgacgaggcgctgctggatcagtacgcacgtgagctgaaactgggtatcagcgatgagcaggttaaacaggcgattttcgcgaccccagccttccaggttgacggcaaatttgataacagccgctataacggtatcctcaaccagatggggatgaccgccgatcagtacgcccaggcgctgcgtaaccagctcactacccaacagctgattaacggcgttgccggtaccgattttatgctgaaaggtgaaaccgacgagctggcggcactggtcgcgcaacaacgcgtggtgcgtgaggcgactatcgatgttaacgcgctggcggcgaagcagcctgtgaccgaacaggagattgccagctactacgaacaaaacaaaaacaatttcatgacgccggaacaattccgcgtgagttacatcaagctggatgccgcaacgatgcagcaaccggttagcgatgcggatatccagagctactacgaccagcatcaggatcaattcacccagccgcagcgtacccgctacagcatcatccagaccaaaactgaagatgaagcgaaagcggtacttgatgagctgaataaaggcggtgattttgctgcattagccaaagaaaaatctgccgatattatctctgctcgtaacggcggcgatatgggttggttagaagatgccactatcccggacgaactgaaaaatgctggtctgaaagaaaaaggccaactgtctggtgtcatcaaatctagcgtcggtttcctgattgtacgtctggacgacattcagccagcgaaagtgaaaagcttagacgaagtacgtgacgacattgcggcgaaagtgaaacacgaaaaagccctcgatgcgtactacgcgctgcagcagaaagtgagcgatgcggcaagcaacgacaccgagtctctggccggtgcagagcaagctgccggcgttaaagccactcagacgggttggttcagcaaagataacctgccggaagagttgaacttcaagccggttgccgacgctatctttaacggcggtctggtaggtgaaaacggcgcgccgggcatcaactctgacatcatcaccgtagacggcgaccgcgcattcgtgctgcgcatcagcgagcacaaaccggaagcggtgaaaccgttggcagatgttcaggaacaagttaaggcattggttcagcacaacaaagctgaacaacaggcgaaagtggatgctgagaaactgctggttgatttgaaagccggcaaaggtgcggaagctatgcaggctgccggtctgaaatttggcgagccgaaaaccttaagccgttccggtcgtgacccgattagccaggcggcgtttgcactgccactgccagcgaaagacaaaccgagctacggtatggcgaccgatatgcaaggtaatgtggttctgctggcgctggatgaagtgaaacaaggtagtatgccggaagatcagaaaaaagcgatggtgcagggtatcacccagaacaacgcacaaatcgtctttgaagctctgatgagtaacctgcgtaaagaggcgaaaatcaaaattggcgatgcgctggaacagcaataatcctgaagccgcctcgcaaaaaaatgcgttgcagctgtaacaagaaaaggtcgctttcgcggccttttccatttctgaacattgccatttgtttactgttttcactgccgttaaggtgattccactgttaacaaacaaggagaaaacagtatgaaacacggaattaaagcactgctcattaccctgcccctggcctgtgccggaatgtctcatagcgcgctggcggcagcttctgtggcgaaaccgacggcggtagaaaccaaagcggaagctcctgcagcacaaagtaaagcagcagtaccggcgaaagccagtgacgaagaaggcacccgggtcagcattaataatgccagcgcggaagagctagcccgcgcgatgaatggcgttggcctgaagaaagcgcaggcgattgtcagttatcgcgaagagtacggtccgtttaaaactgtggaggatctaaagcaggtgccggggatgggcaatagcctggtggaacgtaatctggcggtattaaccctgtaattaatttgcatagtggcaattttttgccagactgaagaggtcataccagttatgacctctgtacttataacaacaacgtaaggttattgcgctatgcaaacacaaatcaaagttcgtggatatcatctcgacgtttaccagcacgtcaacaacgcccgctaccttgaatttctcgaagaagcccgctgggatgggttggaaaatagcgacagttttcagtggatgacggcccataacatcgccttcgtcgtggtcaatatcaatattaactatcgtcgcccagcggtattaagtgacctgttaactattaccagtcagttgcagcaattaaacggtaaaagcggcatcttaagccaggtcattacactggagccggaagggcaggtggtagcggatgcgcttattacgtttgtttgtattgatcttaaaacgcagaaagcattagctctggaaggggaattgcgcgaaaagctggagcagatggttaagtaaacgttttgtggtgccggatgctcaagccgcatccggcgacacccggaataattacctcaacccggttttctgcttcatcgctgccatcaccgtcggtttatcggccagataatgattcaaaccgttggcgcgtaaattacatgccgcacaatgaccgcaaccgtcgcctttaaagccgttatagcaggtcaacgtttcgttacggactaaatccagtttgccgtaataatctgccagcgcccaggtttccgctttatcaatccacatcagcggcgtttcaaaacgaatatctttcgccatgcccaaactgacggcatggtttagtgctttcacaaactcatcgcggcaatccgggtagccggagaaatccgtttcgcagacgccagtaattacggcttctgcttttacctgatacgcatatattgccgccagcgtcaggaacaaaatattacgccctgggacaaacgtattcgggataccatcggcttcaggttcataatcaggcaccggaatgctgtcacgcgtcaggctactgaccgccagctcgttgagcagggtgacatccagcaccttatgcgcgcgtgcccccagtttcagcgccagttcgcgtgccacgtcgatttctgcgcgatgccgctgaccgtaatcgaacgtcacgcaatggacttcatcatattgttgtaatgcctgcaccagacaggtggtggaatcctgacctccactgaacacaacgacagcacgtttcatagataatcctgcttgaacaataaaagcgttatggtaacgcctgcgattaacccggaccagctattcattggcttggcgcgggaagccaggcttcggtaaattcaaaccagccgcgcggtgtcagtcgcacaccgttcacgccgggaggggcactaatgcgatagtgatagttgaacagcggcgtcagcgtcgcatctgtcattaactggctaaaaaccgctttcagggcattaaatcggttttcttcatcaggcattatttgcacggcatccagtgtgctttgtagatgtgcgtatgctggagcgtcgaaaacatgtggccacagcggatcgcagcgcagccattgctccagagtatattccggtgcttcgccaattaatctgtcgcccatcatgaggtctgcgtgtgcctgtagggtcgtgtcgtcccagttttttgcgttatgaaaaataattgtgagttcacagccttccgctgccagtgtcgcctgtaggcgttctgccatggtatgaagttctatcggtaggtgataaaccagcgtcaaggttttcggtagtttgacttcatccggtacctgccaatgcggaatagtccagcctggcagtaatgcatgactggcggtgatcaggttttctccgacttctaacgtttgtaataaaccggattgatgaataatggagatcacttttcgcgcctgccagagggagagtcggggacttttgcgcaacgtcaaatagcaaaaacctaaactgatgccgctactgacctggctgacccgttgcagctcctccggtttgccgatggtgatttgcacgggatgccgacaactggttcccaaatctttttcgaaaagcggcggagttatccagtactcaaccgctttaagcagcggatgacgtaaatggtaataatcatggctttccaggcgcaccagctctgctgtgaattgtgttaagcgaaaaggacccgtgccgatcagtgggaattgcggatgcgccagatggctgcaatagctcgccagccggtgcgcaagccagtaatcagggcgatgtaaaaagaaggtcagacactgcggatgggtgacttcaatacgcttcacgctaataaataattgatccagtgctggcagttgtaacagcatcaataatcgctggtgtaagtgactggcttttactgcatcgccgttatgccagtgtagggtactacgaagataaaagtcccagcgtaacccgtcagtagaggtttcccagtgatgcgctaaatcgccaatcgggcgctgagtattattatcgaagcgggtcaggccggaaaatatctgcccggcgagatgctgctcggcacggccgggcaaaaagcctggttgtagcggttcgagcgggcgatagtagggaatacgcaacgtgggtgtatcgttttgccattgtccgcccataaacggctgtaacagagtgcgcagctcacctggggccagttgcgccagctccagcacatcttgctgctttccggtttccagtgcctgttccatcatcgcattgcgtaggctttccggcgtgaccagaaagcgtaattgtccgcgctttccgcgtccactctgcgcctgccactccagccatcccgcctcctgtgcctgacgcaacagcgtacgaacatggcgttcgctgcaaaaacagcgttcggccagttcgctgacggtgacggtttgcggctttccggcggaaggttgccacagacgttgatactggttaagacggttgagcaatcgcatataaacccggaacaatattatttaactattcactattacttccgtatatatcaggtgatactcaatcaccattaaccgtgtcacagagtggagaaagaaatggctcgtctggcagcatttgatatggatggcactttattgatgcccgaccatcatttaggtgagaaaaccctctctactttggcgcgactgcgtgaacgcgacattaccctcacttttgccacggggcgtcatgcgctggagatgcagcatattctcggggcgctaagcctggatgcgtatttgattaccggcaacggaacgcgcgtgcattctctggaaggtgaacttttacatcgtgatgatttacctgcggatgtcgcggagctggtgctgtatcagcaatgggatacccgagccagcatgcatatcttcaatgacgacggttggtttaccgggaaagagatccctgcgttgttgcaggcatttgtctatagcggttttcgttatcagataatcgatgtcaaaaaaatgccactcggcagcgtcaccaagatctgcttctgtggcgatcacgacgatcttacacgcttgcagatccagctatacgaagcattaggcgagcgtgcacatttgtgtttttccgccacggattgcctcgaagtgctgccggtgggctgcaataaaggcgctgcattgacggtgctgacccaacatttaggtttaagcttgcgcgattgcatggcctttggtgatgcgatgaacgatcgcgaaatgttagtcagcgtcggtagcggatttattatgggcaatgcgatgccgcaactgcgcgcggagctcccgcatttaccggtgattggacattgccgaaatcaggctgtctctcactatttgacgcactggctggactatccacatctaccttattcccccgaataacgagatcccttccagcaccgggcaattgcccggttttttttgcgttgaatttgtcattttgtgccgtggtgtttaaaccgcacagaataaattgtcgtgatttcacctttaaaataaaattaaaagagaaaaaaattctctgtggaagggctatgttagataaaattgaccgtaagctgctggccttactgcagcaggattgcaccctctctttgcaggcactggctgaagccgttaatctgacaaccaccccttgctggaagcgcctgaaacggctggaggacgacggtatccttatcggcaaagtcgccctgctggatccggaaaaaataggcctcggcctgaccgcttttgtgctgataaaaacgcaacatcacagcagcgaatggtattgccgctttgtcacggtggttaccgaaatgccagaagtgctggggttctggcgcatggctggtgaatacgattatctgatgcgcgtccaggttgccgacatgaaacgctacgacgagttttataagcgtctggtaaacagcgtgccggggctgagcgacgtcacttccagcttcgcgatggaacagattaaatacaccacttctttacccatcgaataaatatccagaatcaggtcaggacacaacgcgtgcgattatttgctcaattaagctggtatttccgtcgggaatggcgtcgctatctcggggctgtcgccttgcttgtcattatcgcgatgctgcaactggttccgccaaaagtggttggtattgttgtcgatggcgtgacagaacaacactttactaccgggcagatcctgatgtggatcgccaccatggtgctgattgccgttgtggtttatctcctgcgttacgtctggcgggtattgctgtttggtgcgtcttatcaactggctgttgaactgcgtgaagattattaccgtcagctaagccggcagcatcctgagttttacctgcgtcatcgcaccggtgacctcatggctcgtgcgaccaatgacgtcgatcgcgtcgtgtttgccgccggagaaggggtgctgacgctggtggatagtctggtgatgggctgcgctgtgttgattatgatgtctacgcaaattagctggcagttgaccttattttccctgttgccgatgccagtgatggcgatcatgattaagcgcaacggcgatgctttgcatgaacgctttaagctggcacaggcggcgttttccagtcttaatgaccgcacccaggaaagcctcaccagtatccgcatgatcaaagcctttggtctggaagatcgccagagcgcgttatttgccgcggatgccgaagataccggcaaaaaaaacatgcgggtggcgcgtattgatgctcgtttcgacccgaccatctatatcgcgattggtatggcgaacttgctggcgattggcggcggtagttggatggtggtgcagggcagtttaacgctgggccagctcaccagttttatgatgtatttaggtctgatgatttggccaatgctggcgctggcatggatgtttaacattgtggaacgtggtagtgctgcgtacagccgtattcgcgcgatgctggcggaagcgccggtggtgaacgatggtagcgaacccgtgccggaagggcgtggcgaactggatgtaaatattcaccagttcacgtatccgcagactgaccatcctgcgctggaaaacgtcaatttcgccctgaaacccggtcagatgctgggtatctgcgggccgactggttccggcaaaagtaccctgttgagcctcattcagcgtcatttcgacgtcagcgagggggatattcgctttcatgatattcctctgacgaagttacaactcgatagctggcgtagccgcctggcggtagttagccagacgccattccttttttctgacactgtggcgaataacatcgcgctgggttgcccgaatgccacccagcaagagattgagcatgtcgcgcggttagccagcgtacatgacgatattttgcgtctaccgcaaggttacgatacagaggtgggcgagcgcggtgtgatgctttccggcgggcaaaaacagcgtatctccattgctcgtgcgttattagtcaacgcggaaatcctcatccttgatgatgcgcttagcgcggtggacggacgcactgagcaccagatcctgcataacctgcgtcagtgggggcagggaagaacggtaatcatcagtgcccatcgcctttctgcactgacggaagccagtgaaattattgtgatgcagcacggacatatcgcccagcgtggcaatcatgatgtgctggcacaacaaagcggctggtatcgcgatatgtatcgctatcaacaactggaggcggcgctcgacgacgctccggaaaatcgcgaggaggccgtcgatgcgtaactaaaaatcgcgaggaggccgtcgatgcgtagttttagccaactgtggccgactctcaagcgcctgttagcgtacggtagcccgtggcgtaaaccgctggggattgcggtcctgatgatgtgggttgcggcggcggcagaagtcagtgggccgctgcttatcagctattttatcgacaatatggtagcgaaaaataacctgccgttgaaagtggttgcagggctggctgcggcgtatgttgggctgcaactgtttgccgccgggctacattacgcgcagagcctgctgtttaatcgggcggcagtaggcgtagtgcaacagttgcgtaccgacgtgatggatgctgcgttacgccagccattaagcgagtttgatacccaacccgtcgggcaggtgatttcccgcgtcactaatgacactgaagtgatccgcgatctctacgttaccgtagtggcaactgtcctgcgcagtgccgcgctggtgggcgcgatgctggtggcgatgttcagcctcgactggcgaatggcactggtggcgataatgattttcccggtggtgctggtggtaatggtgatataccagcgttacagcacgccgattgtccgtcgtgtgcgcgcctatttggcggatatcaacgacggctttaacgaaatcatcaatggcatgagcgttatccagcagtttcgtcagcaggcgcgatttggcgaacgtatgggggaggccagtcgtagtcactatatggcgaggatgcaaaccctgcgcctcgacggttttctgctgcgtccgctgctgagtctgtttagtagcctcattctttgtggcttgttgatgctgtttggcttctccgccagcggcaccattgaagtgggcgtgctgtatgcgtttatcagctatcttgggcgacttaacgaaccattaatcgaactgaccacgcaacaggcgatgctgcaacaggctgttgttgctggtgagcgcgtgtttgaactgatggacggaccgcgccagcaatatggcaatgatgatcgcccgttacagagtggcaccatcgaagtcgataacgtgagttttgcttatcgcgatgacaatctggtgctaaagaacattaatctctctgtgcctagccgcaattttgtggcgctggtcgggcataccggcagtggcaaaagcaccctcgccagtttattgatgggctattacccgctaacggaaggtgagattcgccttgatggtcgtccattaagtagcctaagtcacagcgcgctgcgccagggcgtggcaatggtgcagcaagatccggtggtgctggcggataccttcctcgccaacgtgacgctggggcgggatatctccgaagaacgcgtctggcaggcgctggaaaccgtgcaactggcggagctggcgcgtagcatgagcgacggtatttacacgccgctgggcgagcaggggaataatctcagtgttgggcaaaagcaactgctggcactggcgcgcgtgctggtcgagacgccgcaaatcctgatccttgatgaggcaaccgccagcattgactccggtactgaacaggcgattcaacatgctctggcggcggtgcgtgaacataccacgctggtagtgattgctcaccgcttaagcaccattgttgatgccgacaccattctggtgcttcatcgtgggcaagccgtggagcagggcactcaccagcaactgctggcggcccagggacgctactggcagatgtatcaactgcaacttgcgggcgaagagctggcagccagcgtgcgtgaagaggaaagtttgagcgcctgaatagcgcaatatttcatcgttggtgcaaaaatgtaacgcactgtgcactgtcatagtgcgttttcattttcaaacttcttaacttcctgctctctttctcgtttttcatttctggcacaccgcttgcaataccttcttcgtgtagcagaaccattaccgaattctgaccggaggggatctatgaagctggtgaccgtgataatcaaaccattcaagctggaagacgttcgtgaagcgttatcttccattggtattcagggcctgaccgtcaccgaagtgaaaggtttcgggcgtcagaaagggcatgccgagctgtaccggggggcggaatacagcgtcaatttcctgccaaaagtaaaaattgatgtggcgattgctgatgaccaactcgatgaagtgatcgatatcgtcagtaaggcggcttacaccggaaaaattggcgacggcaaaatcttcgtcgctgaattgcaacgcgtcattcgtattcgtaccggcgaagccgacgaagcggcgctgtaatctctggcacacagcaacaggaacgaaaaatgaagatagcgacgataaaaactgggcttgctagtctggcgatgcttccgggactggtaatggctgcacctgcggtggccgataaagccgacaatgcgtttatgatgatttgtactgcgctggtgctgtttatgactattccggggattgccctgttttacggtgggttgattcgcggcaaaaacgtgctgagcatgctgacgcaggtgacggtgacatttgcactggtctgtattctctgggtggtttacggttacagcctggcgtttggtgagggcaacaacttcttcggcaacattaactggttgatgctgaaaaacatcgaactgacggcggtgatgggcagcatttatcagtatatccacgtggcgtttcagggaagctttgcctgcattaccgtcggcttgatagttggggcgctggcggaacgaatccgcttcagtgctgtgttgattttcgtggtggtatggctgacgctctcttacattccgattgcgcatatggtgtggggcggtggtttgctggcttctcacggtgcgctggatttcgcgggtggcaccgtggtgcacattaacgccgcaatcgccggtctggtgggcgcgtatctgataggaaaacgcgtgggcttcggtaaagaggcgtttaaaccgcacaacctgccgatggtcttcaccgggactgccattctctatatcggttggtttggctttaacgccgggagtgcgggcacggcgaatgaaatcgcggcactggcatttgtgaatactgtggtcgcaacggcggcggcaattcttggctggatcttcggtgaatgggcgctgcgtggtaagcctagtctgctgggggcgtgttctggcgcgattgccggtctggtcggcgtgacgccagcctgcggctacattggggttggcggcgcgttgattatcggcgtggtagctggtctggcgggcttgtggggcgttaccatgctcaaacgcttgctgcgggtggatgatccctgcgatgtcttcggtgtgcacggcgtttgtggcattgtcggctgtatcatgaccgggatttttgccgccagcagcctgggcggcgtgggcttcgctgaaggtgtgacgatgggccatcagttgctggtacagctggaaagcatcgccattacgatcgtctggtccggtgttgtggcatttatcggctacaaattggcggatctgacggttggtctgcgtgtaccggaagagcaggagcgagaagggctggatgtcaacagccacggcgagaatgcctataacgcgtaacaagcactgcaaaaaacagccggacggttttcacctccggctatttttttaattgtgattacgcatcaccccttcctgaacggtgctggcaaccagtacgccgtcttgggtataaaactcaccgcgcacaaagccacgtgcgctggacgcgctggtgctctccacgctatacagcagccattcattcaaattaaacgggcgatggaaccacatggaatggtcaatggtggcaatctgaatccccggttcgagaaaaccgatgccgtgcggctgtagagctaccggcaggaagttaagatcagaagcgtaaccgagcagatactgatgaacgcgcaggtcatccggcacgctaccatttgcgcggatccacacctgacgatgtggttctgcgacgtgacctttcagtgggttatgaaactccaccggacggacttccagcggacgatcgcagatgaatttatctttcagcactggcggcagcaggtgcgccaggctttgggcgatttgcgtttcgctagggaggccatcaggcgctggcgcggacggcattgttttttgatgttcgaaacccgcttctggtgcctggaaagaggcagtcatataaaaaatcggtttgccgttttgaatagcagcaacccggcgggcgctgaagctgttaccgtcacgcagcgtttcgacatcataaataatcggcttcttactatcgccagggcgaagaaagtagctgtgaaagctatgtaccagccgctcttcagggacggtctcttttgcagcatacaaggcctgacccacgacctggccgccaaacacctggcgtaaacctaaatcttcactctggccgcgaaagagtccttcctcaattttttccagatttaacaatgtcagtaaattttttagcgcctgactcatataactctccagtaacaaagctgccgcagcaagccaaagtgagttgagtataacgcaaatttgctactggtccgatgggtgcaatggtctgaattacgggctaattacaggcagaaatgcgtgatgtgtgccacacttgttgacgttactattttgttaaccactcttccggcgaggaaagttagcccgctggtgcattgataataaggagaaatgaatgaaactcgtgcacatggccagtggtttagcggttgcgattgcgttggcggcttgcgcagataaaagcgcggatattcagacgccagcaccggctgcaaatacgtctattagtgcaacacaacaaccagctatccagcaaccgaatgtctccggtaccgtctggatccgtcagaaagtcgcactgccgcctgatgctgtgctgaccgtgacactttctgacgcgagcttagccgatgcaccgagtaaagtgctggcgcagaaagcggtgcgtactgaaggtaaacagagtccattcagctttgttctgagttttaacccggcagatgttcagccgaacgcgcgtattctgttgagtgcggcgattaccgtgaatgacaaactggtatttatcaccgataccgttcagccggtgatcaaccagggcggaactaaagccgacctgacattggtgccggtacagcaaaccgccgtgccggttcaggccagcggtggcgcaacgactaccgtacctagcactagtccaactcaggtgaatccgtctagcgcagttccagctcctacgcaatattaagcgacgttaaccctctccgcccggagagggttagtagttccagcgataacgctgcaagtcgatttgcccgcttccgcttaccatcacaccttctgccagtaatgcctgtcgctgacgctgtaaatccggtccggttaggctaattgtgccgtggcgattaaccacccggtgccagggtaaggtgctgccttcagggagacgctttaacacaccgcccacctggcgcgcggcgcgggggcttcccgccagtttcgccacatcaccgtaagtggtgacatagccttcgggaatagcggcgacgatttgccagacgcgttggggaaaactatcttctttttccatcttttcttcctgaggtaatttttcagcataatctggaaaaacgccgctgtgaagtcgcattgcgcaagaaaccagcatctggcacgcgatgggttgcaattagccggggcagcagtgataatgcgcctgcgcgttggttctcaacgctctcaatgggggctctgttggttctcccgcaacgctactctgtttaccaggtcaggtccggaaggaagcagccaaggcagatgacgcgtgtgccgggatgtagctggcagggcccccacccatttctgcctcccaccgtttcgtcaaaaaatcccaacatggctaaactttaaccacaactgacgtcgcaagaattgtctggctgcgcagtacgcttcggaggtatgtctgatgaagtatgttgatggttttgtggttgccgttcctgccgataaaaaggatgcctatcgggaaatggccgctaaggctgcgccattgtttaaagagtttggcgcgcttcgtattgtcgaatgctgggccagcgatgtaccggatggcaaagtgaccgattttcgtatggcggtgaaagcggaagagaatgaagaggttgtctttagctggattgaataccctagtaaagaggtccgcgacgctgctaatcaaaagatgatgagcgacccacggatgaaagagttcggcgagtccatgccgtttgacggcaagcgaatgatctatggcggattcgagagtatcatcgacgaataagtagcgtgacgggctgtgcggcgtgccgtcagcccaaaaattcacaaatgttgctcggcccagcgtaagaaatcttctttcggtaatgccttgctgtagagccagccctgaccgtagtgcacgccatgctggcgtaaccactcttcttgtttactggtttcgattccctccgctaccattttcagtttcagtgtttttgccatttcgatgatatgcggcgtgacatttttatattccagcgcatcaacgaaagatttatcgatcttcagaatgtcgacatccagatcctgtaaataacttaaactactataccccgtaccaaaatcatcaagataaatttcatggcccgcctcccggtagcgagaaattatcggggcgctggttttcggatcggcaaactcgcgttcagtgagttcaagcgcgatctgtctgggattaacctgatagtgattgatcatgtcacgcagcaattgcgggattttttcgctggtgagcacgggggattcaagattgatgctaatatgctgctgtggatgctgacgcagccagtcgcccatatcttcaaagacgcttcttataatcagtagcgtcaatggctcagaaaggcccgtttgctgtgccagcggaataaaactatctggactcaaccaactaccgtctgtctgcggccagcgcgccagtgcctcagcaccgacaattttgccattggctaaggagacaatcggctgatagtgcacgcaaatatcacgattttcgatagcatcctgcagccgatgatgcggactctgaatacggcgcaaaatacgcagcacaaacatcgctgccagcaggccaatcaccaacccgagcggtaaccaaataaagacttgccgatgccagcctttctgcaacattttcgtactagcccatgtgatgatgctaatattcatctccggtaagggcaggatatcgtaaatgattccattattttcgatatgctcaccgggtgttttttgtagcctggtaataattccctgagcaatttcatcgctgctggttatgacaacgttatgggcattgccaataatggcggcatcaatttgccaactgctatagggaatgacatcaataaaggaagcggggtcgatcatgacgacataatgtgccgttcccatggcgaccatgtaacggataatgcctaaatcgttatggcttgttaaccagacacgataaccatctttgctaattttacctggctcggggaaggtatcgggcggactttcatgctccagagagctacactggggaacgttgttatcgatataagccacttcctgaatatagcgataactgtaagatacccgacgcatttccatgagatgggcttcgctacaggcagcgccttgccatctttccagctcctgcagcgcatctttcccttgtgtcgccaccttattggctcgaatagcgacgcgggaggaataggtatccagctcttcaataaagcttgtttctacctgctgatgggccagccagatgcttaagccgacaggcagcaatacactaagaatcagtactccgctaataaggccgaccagatgtcgtgttctcaccagcatatccttattaacacagtgtagggaaagtatatctgattgtggaaaaaggctggctggagataaggaggtagagctggtatttcatgaagtgatgggtggaaacgatcattgtcatttgaccaggcgcagagctttacgcctggtatgtaaccctaacttaagatgtactttcggcgcgagcgagggtaaaaatatcgtaaaaagacagttcacctttacggacgatcattttttgcagttgttccttatgaacatccgcgacacgcggagagttcaagatggcttcaaccagcgcggcaggtacaaagcgcgtgttgtaccattcgccgttatagcaaacgcggaaatccagcacgtcgatatcttcatagcggtagcgtgggtagacatcgaaaaagaagaaaccattaagcaggataaataatacaaccagtagccagacagagccactcagcgtttcggactgcaacatcaccgccagggtggcaaaaaaagcaacgtacataccgataaacagccccggatgtttacggataaaactgatactaaagcggggtttgttgtcgcgtttttcgcgggtattcagagactcaatcgtttcggtcagcaggcgttgtatttcggtcatcgtttgccttcgtggtatctgcaactttccagggaacaccctattttaacgtgggaatagtagaggggaagtaacagatctaccacaattttgcataacagttgcgaaaaaccgattacaattttttaattattctggctggattaccgcccacgacaacgttgtccgggacatcttttgtgacaactgcaccactggctaccacgacgttatcaccaatggtcacaccagggttaatgaccgcgcgtccgccaatccagacgttattaccgatggtgacgggtttccccagttcagcaccgctattacgtgctacagggtcgatgggatgtgttgccgtgtagatatgaacgcctggtgccaacatacagttatcaccgatgcgaatagggcagacatcaagcatcacgcaatcgaagttggcgaaaaaattattaccgagaaaaatgttatagccatagtcacagcgaaacgttggctcaatataagcctctgtcacctgaccgaatagatcagcgagaatttgctggcgtaatgtgtgctcttccgccagggaatgattgtatcggtgaataagctgacgagcgcgcaggcgatcgcgagataacgtctcatctgcgctgcgatacaactcaccagcaatcatcttttctttttctgtgctcattactgacctccggttgctgaaaatgcggcaacacagtaagacgaaaagtcagtgaagagaacgttcccattacatctgtgtgataaagatcacatagggtatgtcttcatggcgaaaaagtataaaattcttaataaacagccggttatagctccgaaagcgaattatttattagcgaataaatttccatacactggaagggatcttgtcgtacagtttattcatggtcaattcggcgaggcggtgatctgcggcactgtaaaataccgccagttcattatcacttaattcgtatttatttttctcgataacacgctccagcgtgtcaattgtctggcaacgacgtaaacgcattaaataatcggttttcgttaaaggtttttcggacatacttctacctatggttgtaataattttaacaagataaactcgcaggattctctttcgtcgcattgacaaaacaacggaatagtcgattaccactcttccgccatttctgaagatcctgcatattaataccataactactgaacaacataaaggtgtcatccagatattcgtcgatctgctcaatgagcttattgtcttcattatacttaattttgtaattaagtgcgaaggtcgcaatatgctcaatcagttcattcaactggaggttgatcgcgctggttgggtcgtttacccagccatgattgctttcttcaaggtttgcaaggcagtcatgatacagggtttcacagagaaacttaagctgtgcgatatcatgtcttttgggactgtattcatccataacgcgtccccttcttagcggttgaactaacggacacctttcgggatggaaaaaacttactgacctggacttgccctctcgtttgttagcttaactataagccactctttgcaggttttcatcgcattattacgaaaaattacaattaggaaggaagcgggacaggactcactttttcatactagcactaacccgcagcaggtaaaagcagtttgctcgaactattcataacatttcaggattatcgccagatgaaattggtgacactaataccaggattgctctgaatatgacgtaataaccgaggaatgaataaagaattaccgcaaataattaagaatagcctctaaatgattatggattattaaatctattagcgctacttaatataaattaactaacaatcagtattttttatgaattttatccgtggttaatactggttttcgtatgagatcctgagttggtggttcaattactccttaatgttcgtaggttatgcataaaaaaggccgcttacgcggccttagtgattacacgttgtatcaatgatgatcgacagtatggctgtgctcgatatcttcattcttgcggctaaagcggcggcgaaccaccacaaagaataccggaacgaagaagattgccagtaccgttgcggtcaccatcccgcccattacaccggtacctactgcgttctgcgcgccggaaccagcaccagtactgataaccagcggcataacgccgaggataaacgccaggctggtcatcaggatcggacgtaaacgcatccgcaccgcatcaagcgtcgcttcaatcagacctttaccttctttatccatcaagtctttggcgaattcgacgataaggatcgcgttcttcgcgctcaacccaatggttgtgagcaggcctacctggaagtaaacgtcattggtcaggccacggaaggtggcagccagcaacgcaccgataacccccagcggaacgaccagcataacggagaacggaatgctccagctctcgtacagcgccgccagacacaggaacacgacaatcaagctaatcgcgtacagactaggtgcctggttgccggagagacgttcctgataggacatccccgtccagtcatagccaacaccggtaggcagtttgctcgccagttgttccatcagctccattgcttcaccggtacttttacccggtgccgcctggcctaagatttccatggatggcaggccgttgtaacgttccagacgcgggctaccgtactcccaacgagaagaggagaacgcgctgaatggcaccatctgaccatcagcagcacgaacataccagtcgccgatatcatccggcagcatacggtatttcgcttcactcatgacataaactttcttcacacgaccgcggtcgataaagtcgttcacatagctgccgccccatgcagcgcccagagtggtgttaatgtcgttgatagaaacacccagcgcctgcgctttttcctggtcgatatcaatcttaaactgcggggtatcttccagaccgtttggacgtacgctggtcaacatatcagggtgcttcgctgcttctgcaagcaactggttacgcgcctgagtcagtttttcgtgaccaaggccagcctggtcaatcagctcaaagtcaaagccggttgcagtacccagttccacgattgcgggcaggttaaaggcgaaaaccatcgcatctttgatttggctgaaagcgcgtgttgcacgcatggtaatcgcttcaactttgttttcttcgcccggacgatcggcccagtccttcaaggaaacgaacgcaataccggtattctgaccacgtcccgcaaagccgaagccgttaacggcgaacacgctctcaacgttgttcttttctttggtcagatagtaatgcgttacctcattgagcactttctgtgtacgttcctgcgttgcacctgctggcagctgaaccatggtcataaacacgccctggtcctcatctggcaagaaggagcttggcagacgcacgaacagataggccatgccgaccacgatgatcagatacagcaccaggtaacgccccgtactgcgcagaataccgcctacgctgtcggtgtagtggtgcgtgctcttctcgaacatgcggttaaaccagccgaagaagccttttttaccttccccgtgatcgcctttggcaatcggtttcagcatggtggcacaaagagctggagtcaggatcaacgccaccagtacgctcagcgccattgcactaacaatggtaatagagaactgacgatagatagcaccagtagaaccgccaaagaaggccatcggtacgaataccgcgctcagtaccatcgcgataccgaccagagcgccctgaatctgccccatgctcttacgggtagcttcttttggcggcaaaccttcttccgccataacacgctcaacgttttctaccacaacgatggcgtcatccaccaacaggccgatggcgagcaccatcccgaacattgttagcgtgtttatgctgaagccaaaggcggcaaggacggcaaaggtcccgagcaataccaccggtacggcaatggtcggaatcaacgtcgcgcggaagttctgcaggaacagatacataaccaggaacacgaggatgatcgcttcgaccagcgttttaaccacttcgtgaatagagattttcacgaacggcgtggtgtcgtatgggtaaacaattttcagaccgctcgggaagaacggttccatcttcgccagttcagcacggattgccgcagcggtatccagcgcgtttgcaccggtcgccagcttgatccccagaccggaagccggttggccgttaaactctgcgatgatgtcgtagttctcaccacccagctcaatcttcgcgacgtcacgcagcagcacgcgggaaccatcctgattcactttcagcaggattttgccgaactcttcagtagaggtcagacgcgtctgagcaataatagaggcgttaagctgttggcctttcaccggcggcgtaccaccgagctgacccgccgcaacctgggcgttctgcgctttgatggcggtaatgacatcaaccggcgttagctggaatttgttcagctcattcgggttcatccagatacgcatcgcgtactgactaccgaacaactgaacatcacccacgccgctcgtacggctgatggcatctttcatattcgccgccacgtagtcggagatatcctcctgcgtcatggtgccatcggtgttgataacgccgacaaccatcaggaagctgctggaacttttctcaacgctcaccccttgctgctgaacttcttgcggcagcaacggcatcgccagctgcagtttgttctgcacctgaacctgcgcgatatccgcatcagtaccagactcaaaggtcagggtgatctgcacggtacccgtggagtcactgttagaggacatgtacatcaggttatcgataccgttcatattctgttcgataacctgtgtcaccgtgtcctgcactgttttcgcatcagcgccggggtaggaggcggagatcgttactgccggcggtgcaatcgtaggatgttgcgccaccggcagtttgaggatcgccagcccccctgccaacatgatgataatggcgatcacccacgcaaaaatcgggcgatcgataaagaaattaggcatgtcttaacggctcctgtttaagttaagacttggactgttcaggctgagcaccgcttgcggcttgctggttattatcagcggtaacttcttgtgcttttacctggacaccaggacgcactttctgcagcccacttattactacgcgatcgcctgctttcagaccttctgtcaccagccacttatcgccaatagcctggcttgcaacgatcggacgggtttccactttgtcatccgcgccaactaccagtacggtggcatcgccacgcggcgtacgggttacgccctgttgcgggactaaaatagcgtttggattaagcccttcttccagacgtgcgcgcacgaacatacccggcagcagagtgtgatccgggttcgggaagatagcgcgtagggtgatagacccagtggtctgatcaacggtaacgtcagagaattccagcgtaccgtcctgcgggaacttaatgccgtcactggtgatcagactcactttggctttgccgttctcttgtttcagcgtgccattcgccagttcctgtttcaggcgcaggaagtcgttgctggactgggtcacatcaacgtagatcggatcaagttgctgcacggttgccagcgcagtcgcctgaccgttctgtaccaatgcgccttccgtcacgttgctcttaccaatgcgaccgctaatcggagaggtgactttggtgtaagccagattgatccgcgcagtttcaacggcagctttcgccgcagttaccgcagcattcgcctgttgcgcatcagccagagcctgatcgtactcttgcttactgatgtactgagtaccgagcagtttctgataacgattcaccgtcaattgcgcgatattggctgcagcctgggctttcgccagatcacctttcgcactgtcgtatgtcgcctgataggtcgcaggatcaatctgatagagagagacacctgcttcgatgtcgctaccttctttgaaattacgcttcaggataatcccgctaacttgaggacgaacttctgcgatccggtaggcactggtgcgacccggaagctcggttgtgatctgcagaggttcagttttgactgttactacgccaacggcgggcatctgctggccaccttgttgggcctgtttgtcgtcacatcctgttagggctaagctgccactgagcatcagaacgaccgccagaggcgtaaaccctctgtttttgttcatatgtaaacctcgagtgtccgatttcaaattggtcaatggtcaaaagttaataaacccattgctgcgtttatattatcgtcgtgctatggtacatacattcacaaatgtatgtaaatctaacgcctgtaaattcacgaacatatggcacgaaaaaccaaacaagaagcgcaagaaacgcgccaacacatcctcgatgtggctctacgtcttttcagtcagcagggggtaagttccaccagcctgggcgagattgcaaaagcagctggcgttacgcgcggtgcaatctactggcattttaaagacaagagcgatttgttcagtgagatctgggaactgagtgaatccaatattggtgaactagagcttgagtatcaggcaaaattccctggcgatccactcagtgtattaagagagatattaattcatgttcttgaatccacggtgacagaagaacggcgtcgattattgatggagattatattccacaaatgcgaatttgtcggagaaatggctgttgtgcaacaggcacaacgtaatctctgtctggaaagttatgaccgtatagaacaaacgttaaaacattgtattgaagcgaaaatgttgcctgcggatttaatgacgcgtcgcgcagcaattattatgcgcggctatatttccggcctgatggaaaactggctctttgccccgcaatcttttgatcttaaaaaagaagcccgcgattacgttgccatcttactggagatgtatctcctgtgccccacgcttcgtaatcctgccactaacgaataaccctgaatctgactccaggatttttcctggacattttcgtcgttgctattctggttcactgcgtcgtgatattcttgcggtttgactttttcaggtcgttcttcaggttcagaaaccttcattcatcatgactatgttccagtattacaaacgaagtcggcattttgtttttagtgcatttattgcttttgtttttgtcttgttatgccagaacacggcgtttgcgcgggcgagtagcaatggtgatctgccgacaaaagcggacctgcaggcgcaacttgacagtctaaataaacaaaaagatctttctgctcaggacaaactggtgcagcaggatctgacagatacattagccaccctcgataaaatcgatcgcataaaagaagagacagttcagctacggcaaaaagtcgctgaagcgccggaaaaaatgcgccaggcgaccgcggcgttaacagcacttagcgatgtcgataacgacgaagaaacgcgcaaaattctgagcacgctgagcttgcgccagctggaaactcgcgttgcccaggcgctggacgatttgcaaaacgcacaaaacgatctggcgtcttataacagccagctggttagcttacagacgcagcccgaacgcgtgcaaaatgcgatgtataacgctagccagcagctgcaacaaattcgcagtcgtctggatgggactgatgtcggcgagacagccttacgtcccagccagaaagtgttaatgcaggcccagcaggcgttgctgaatgcggagattgaccagcagcgtaaaagcctggaagggaacaccgtcttgcaggataccttgcaaaagcaacgtgattacgtgacggcgaacagcgctcgtctggagcaccagttacaactgttgcaagaagcggtaaacagcaagcgcctgactttaaccgaaaaaacggcgcaggaagccgtctccccggatgaagccgcgcgtattcaggctaatccgctggtgaagcaggaactggaaattaaccagcagttaagtcagcgtctgattaccgcgactgaaaacggtaatcagttgatgcagcaaaacattaaagtcaaaaactggctggagcgggcgctgcaaagcgaacgcaatattaaagagcagattgccgtcctgaagggcagcctgctgttgtctcgtatcctttaccagcaacaacaaacgctgcccagcgcggatgaactggaaaacatgaccaaccgcatcgcggatttgcgtctcgaacagtttgaagttaaccagcagcgtgatgcactcttccagagcgatgcgttcgtcaacaaactggaagaaggtcacaccaacgaagtcaacagcgaagttcacgatgcgttattgcaagtggttgatatgcgtcgcgaattgctggatcaactcaacaaacagttgggtaaccagctgatgatggccattaacctgcaaatcaaccagcagcagttaatgagtgtgagcaaaaacctgaaatccatcctgactcagcaaatcttttgggtgaacagtaaccgtccaatggactgggactggatcaaagcgttcccgcaaagcctgaaagatgaatttaagagcatgaaaatcacggtgaactggcaaaaagcctggcccgccgtttttatcgctttcctcgctggtttgccgctgctgttgattgccgggctgatccactggcgtctgggctggctgaaagcgtatcaacaaaaactggcttccgctgtgggttccctgcgtaacgacagccagctcaacacaccaaaagcgatccttatcgacctgatccgtgcgctgccggtgtgcctgattattctcgcggttggcctgattctgttgaccatgcagctcaacatcagcgaactgctatggagcttcagcaaaaaactggcgatattctggctggtgtttggcctgtgctggaaggtactggagaaaaacggcgttgccgtacgtcacttcggcatgccggaacagcagaccagccactggcgtcggcaaattgtccgcatcagtctcgcattgctgcctatccatttctggtctgtggtggcagaactttccccgctgcatctgatggatgatgtgctggggcaagcgatgattttcttcaacctgctgctgattgccttcctggtatggccgatgtgccgcgaaagctggcgtgataaagagagccacaccatgcgactggtcaccattaccgtgctgagcataatcccgattgcgctgatggtgctgactgctacaggctacttctacactacgctgcgtctggcaggacgctggattgaaaccgtttatctggtgatcatctggaacctgctgtaccagacggtactgcgtggcttaagcgtagcggcgcggcgtatcgcctggcgtcgtgcgctggcgcgtcggcagaatctggtgaaagagggcgcagaaggtgctgaaccgccggaagaacccaccattgcactggagcaagttaaccagcagacgctgcgtattaccatgttgctgatgtttgcgctgttcggtgtcatgttctgggcaatttggtccgatttgatcaccgtgttcagctatctcgacagcatcacgctctggcattacaacggcactgaagctggcgctgcggtggtgaaaaacgtcaccatgggcagtctgttgtttgcgattatcgccagtatggtggcctgggcgttgattcgcaacctgcctggtttactggaagtgctggtgctcagccgactgaatatgcgccagggcgcgagctatgccattactaccatccttaactacatcattattgctgttggtgcgatgacggtgttcggaagcctgggcgtctcttgggataaactccagtggctggccgcagcattatccgtaggtcttggttttggtttacaagaaattttcggtaacttcgtctccggtttgatcattctattcgaacgtccggtgcgtattggcgatacggtaaccattggtagcttcagcgggacggtaagtaagatccgtattcgtgcgacaacgattaccgatttcgatcgcaaagaagtgatcatcccgaacaaagcgtttgttaccgagcgtctgatcaactggagcttgactgacactactacgcgtctggtgatccgtctcggcgtggcctatggctccgatctggaaaaagtgcgtaaagtgttactgaaggcggcgactgagcacccaagggtgatgcacgaaccaatgccggaagtcttctttacggcatttggtgccagcacgttggatcatgagctgcgtctgtatgtgcgtgaactgcgtgaccgtagtcgtactgtcgatgagctgaaccgtactatcgatcagctgtgccgtgaaaacgacatcaacattgcctttaaccagcttgaagtgcatctgcacaacgagaagggcgatgaggtgacggaagtaaaacgcgactacaaaggcgatgacccgacgccagcggtagggtaaaaacgaaagggggcaacatttagttgccccgagattgctaacaaagtgcgcgttgttcatgccggatgcggcgtgaccgccttatccggcctacgaaaccgcaagaattcaatatattgcaggagcggtgtaggcctgataagcgtagcgcatcaggcagttttgcgtttgcccgcaaccttaggggacatttagcgaccccatttatttctcacttttccgcctcatcatcgcgcgttaatttcttttcataatcacgctttacaatatccagcgcgcgcagcacggtactggcagggatctgattttcctccagcagcacaatcaaatcgacagccagtttgacatcgtcaggggcattttccagactcatattctctccattgttagcgggttaaacgcgctaacctgttttcgattttttccagcgcatggcggcagcgtgccaggcgcgcttcataggcttccacttcacgatgcagcgtttgctgttccacgagatcggtcacccgcgccagacgggctctgcgttcggcaaccatctcacgtagccgccgctcaaaatcctgatgctgaatacgtttacgctgccagcgggcaattttcggtggtgcactgtcccactcgcgcaaactccaggcggaggcttcacgcgcgatggcttccagttgtgccgccagatgttccgccagccaggccacttgcggcagctgttgctgctcaactgcatgacgaagcgcagccagattatcgcccgcctcgtcgagacaagcctgtagtgttgtcgcacgagtctgaaaaagatgcctgtcgaaacgagcacttagcgtggcgaactgactcaccggggcacaacgctgacgcagcgtagcgagctgtccttccagtttttccagcagcagggcggttttcacgataagacctcaatgaaaatgataattgttatgctaaagtagccactctgtaagctgacaacactcaatatgcaacgaatcattttaatcatcattggctggctggcggtagtgctgggtacgctgggcgtggtattaccggtattaccgacgacgccgtttatcctgctggcggcctggtgctttgcccgttcttccccgcgctttcacgcctggttgctgtaccgcagttggtttggcagctatctacgtttctggcagaaacatcatgcgatgccgcgcggcgtcaaaccgcgggcgattttgcttattttgctcacgtttgccatttctctgtggttcgtccagatgccatgggtgcgcatcatgttgctggtaattctcgcctgtttgcttttctatatgtggcgaattccggtgattgatgaaaagcaagaaaagcactgaagcacaacaatcgcagttgcaattattgcgtacagccagtacattctggcgttttcgagcacaggcgcaggcggtcaaaggttaaacaactgttacttttgatacgtttaaaacgcgccgtgagtaccaccgtaacaagcaggcatacacttatgaccgcgactgcacagcagcttgagtatctcaaaaatagcatcaaaagcattcaggactacccaaaacccggcattcttttccgcgatgtcaccagcttactggaagacccgaaagcttacgctctcagcatcgacttgctggttgagcgttacaaaaatgcgggcattaccaaagttgtcggcaccgaagcgcgtggcttcttgtttggcgctccggtagctctgggtctgggcgttggctttgtaccggtccgtaaaccgggcaaactgccgcgtgaaaccatcagtgaaacttacgacctggaatacggcaccgatcagctggagatccacgttgatgccatcaaaccgggcgacaaagttctggtggtggacgacctgctggcaaccggcggcactatcgaagcgaccgttaaactgatccgtcgtctgggtggtgaagtggctgacgctgcgttcattatcaacctgttcgatctcggcggcgaacagcgtctcgaaaaacagggcattaccagctacagccttgtcccgttcccgggccattaattatcgccagtcttgtgctgcccacgctacggacagcacaagatgtgcattcagcctcgccgttctgacggggctgtgttagcattaccccttcgtgaatccaccttccagcgtttcagagcctgccaatgagttatcaggtcttagcccgaaaatggcgcccacaaacctttgctgacgtcgtcggccaggaacatgtgctgaccgcactggcgaacggcttgagcttggggcgtattcatcatgcttatcttttttccggcacccgtggcgtcggaaaaacctctatcgcccgactgctggcgaaggggctaaactgcgaaaccggcattaccgcgacgccgtgcggcgtgtgcgataactgtcgtgaaatcgagcaggggcgctttgtcgatctgattgaaatcgacgccgccagccgcaccaaagttgaagatacccgcgacctgctggataacgtccagtacgctccggcgcgtggtcgtttcaaagtttatctgatcgacgaagtgcatatgctgagccgccacagctttaacgcactgttaaaaacccttgaagagccgccggagcacgttaagtttctgctggcgacgaccgatccacagaaattgccggtgacgattttgagtcgctgtctgcaatttcatctcaaggcgctggatgtcgagcaaattcgccatcagcttgagcacatcctcaacgaagaacatatcgctcacgagccgcgggcgctgcaattgctggcacgcgccgctgaaggcagcctgcgagatgccttaagtctgaccgaccaggcgattgccagcggtgacggccaggttagtacccaggcggtcagtgcgatgctgggtacgcttgacgacgatcaggcgctgagcctggttgaagcgatggtcgaggccaacggcgagcgcgtaatggcgctgattaatgaagccgctgcccgtggtatcgagtgggaagcgttgctggtggaaatgctcggcctgttgcatcgtattgcgatggtacaacttagccctgctgcacttggcaacgacatggccgccatcgagctgcggatgcgtgaactggcgcgcaccataccgccgacggatattcagctttactatcagacgctgttgattggtcgcaaagaattaccgtatgcgccggaccgtcgcatgggcgttgagatgacgctgctgcgcgcgctggcattccatccgcgtatgccgctgcctgagccagaagtgccacgacagtcctttgcacccgtcgcgccaacggcagtaatgacgccaacccaggtgccgccgcaaccgcaaagtgcgccgcagcaggcaccgactgtaccgctcccggaaaccaccagccaggtgctggcggcgcgccagcagttgcagcgcgtgcagggagcaaccaaagcaaaaaagagtgaaccggcagccgctacccgcgcgcggccggtgaataacgctgcgctggaaagactggctagcgtcaccgatcgcgttcaggcgcgtccggtgccaagcgcgctggaaaaagcgccagccaaaaaagaagcgtatcgctggaaggcgaccactccggtgatgcagcaaaaagaagtggtcgccacgccgaaggcgctgaaaaaagcgctggaacatgaaaaaacgccggaactggcggcgaagctagcggcagaagccattgagcgcgacccgtgggcggcacaggtgagccaacttagcctaccaaaactggtcgaacaggtggcgttaaatgcctggaaagaggagagcgacaacgcagtatgtctgcatttgcgctcctctcagcggcatttgaacaaccgcggtgcacagcaaaaactggctgaagcgttgagcatgttaaaaggtagtacggttgaactgactatcgttgaagatgataatcccgcggtgcgtacgccgctggagtggcgtcaggcgatatacgaagaaaaacttgcgcaggcgcgcgagtccattattgcggataataatattcagaccctgcgtcggttcttcgatgcggagctggatgaagaaagtatccgccccatttgatcgtaagcacagcttacgttcgtcatccttaacgtgattgagagagaaacctatgtttggtaaaggcggtctgggtaacctgatgaagcaagcccagcagatgcaagaaaaaatgcagaaaatgcaggaagagatcgcgcagctggaagtcaccggcgaatctggcgcaggtctggtaaaagtgaccatcaacggtgcacacaactgccgtcgcgtagagatcgacccgagcctgctggaagacgacaaagagatgctggaagacctggtggctgcagcattcaacgacgcagcacgtcgtattgaagaaacgcagaaagaaaaaatggcctctgtatcctccggaatgcagctgccgcctggctttaagatgccgttctgatgcaaaccagcccgctgttaacacagcttatggaagcactgcgctgtctgccgggcgttggcccgaagagcgcgcagcgtatggcgttcacgctgcttcagcgcgatcgtagcggcgggatgcgtctggcgcaggcgctcacccgggcgatgagcgaaatcggccactgcgccgattgccgcactttcaccgaacaggaagtctgtaacatctgtagcaatccgcgtcgtcaggaaaacggtcaaatctgcgtggtggagagtccggcggacatctacgccattgagcagacggggcagtttagtggtcgttattttgtgttgatggggcatctgagtccgctggacggcatcggtccggatgatatcgggcttgatcgtctggaacagcgtctggcagaggaaaaaatcactgaagtgatcctcgccaccaaccccacggttgaaggtgaagctaccgctaactacattgccgagctttgcgcgcaatatgacgtggaagccagccgaatcgctcatggcgttccggttggcggcgagctggaaatggtcgacggcaccacgttgagtcactcccttgccgggcgtcataagattcgtttttaagcaaacgagagcaggatcacctgctctcgcttgaaattattctcccttgtccccatctctcccacatcctgtttttaaccttaaaatggcattattgaggtagacctacatgaaaggacaagaaactcgtggttttcagagtgaagtgaaacagcttctgcacctgatgatccattctctctattccaataaagaaatcttcctgcgtgagcttatctctaacgcctccgatgcggcggacaagctgcgtttccgtgcgctctctaacccggacctgtacgaaggtgatggcgaactacgcgttcgtgtctctttcgataaagacaagcgtacgctgaccatctccgataacggcgtggggatgacccgcgacgaagtgattgaccatctggggactatcgctaaatccggtaccaaaagtttcctcgaatccctgggttctgaccaggcgaaagacagccagctgatcggtcagtttggtgttggtttctactctgcgtttatcgtggccgacaaagtgaccgtgcgtactcgcgcggcaggcgaaaaaccagaaaatggcgtcttctgggaaagcgctggcgaaggtgaatacaccgttgccgacatcaccaaagaagatcgtggtactgaaatcaccctgcatctgcgtgaaggcgaagacgagttcctcgatgactggcgcgtgcgttccatcatcagcaaatactccgaccatatcgcgctgccggtagagatcgaaaaacgcgaagagaaagacggcgaaaccgttatctcctgggagaaaatcaacaaagcgcaggcgctgtggactcgtaacaagagcgaaatcaccgatgaagagtacaaagagttctacaaacacatcgcccacgactttaatgatccgctgacctggagccacaaccgtgttgaaggtaagcaggagtacaccagcctgctgtacatcccgtcccaggctccgtgggatatgtggaaccgcgatcataaacacggcctgaaactgtatgttcagcgtgtgttcatcatggacgacgcagaacagttcatgccgaactatctgcgcttcgtgcgtggtctgattgactccagcgatctgccgctgaacgtttcccgtgaaatcctccaggacagcacggtaacgcgtaacctgcgcaatgcgctgaccaagcgtgtgctgcaaatgctggaaaaactggcgaaagacgacgcggaaaaataccagaccttctggcaacagtttggcctggtactgaaagaaggtccggcggaagatttcgctaaccaggaagcgatcgccaaactgctgcgttttgcttctacccataccgattcttctgcgcagaccgtatctctggaagactacgtttcccgcatgaaagaagggcaggagaaaatctactacatcaccgcagacagctatgcggcagcgaagagcagcccgcacctggaactgctgcgtaagaaaggcatcgaagttctgctgctttccgaccgcatcgatgagtggatgatgaactatctgactgagttcgacggtaaaccgttccagagcgtgtctaaagttgacgagagccttgaaaaactggctgacgaagttgatgagagcgcgaaagaagcggagaaagcactgactccgttcatcgaccgtgtgaaagccctgctcggcgagcgcgtgaaagatgtccgtctgactcaccgtctgaccgatacgccagcgatcgttagcaccgacgcggacgaaatgagcactcagatggcgaaactgttcgctgcggcgggccagaaagtgccagaagtgaaatacatcttcgaactgaacccggatcacgtactggtgaaacgtgcggcagatactgaagatgaagcgaagttcagcgagtgggtagaactgctgctggatcaggcgctgctggcagaacgcggcacgctggaagatccgaacctgtttattcgtcgtatgaaccagctgctggtttcctgatgtaatgccggatgaccttcgtgtcatccggcatttttcttttcatcatctgcactttccgcaaattatctcgccattaaccgtttcagccccaggtgcctttcttgaggcaatcgcctgttggtggtatcgtttatcgctttttcaaaaaattcgacacattttaaggggattttcgcaatgcgtatcattctgcttggcgctccgggcgcggggaaagggactcaggctcagttcatcatggagaaatatggtattccgcaaatctccactggcgatatgctgcgtgctgcggtcaaatctggctccgagctgggtaaacaagcaaaagacattatggatgctggcaaactggtcaccgacgaactggtgatcgcgctggttaaagagcgcattgctcaggaagactgccgtaatggtttcctgttggacggcttcccgcgtaccattccgcaggcagacgcgatgaaagaagcgggcatcaatgttgattacgttctggaattcgacgtaccggacgaactgatcgttgaccgtatcgtcggtcgccgcgttcatgcgccgtctggtcgtgtttatcacgttaaattcaatccgccgaaagtagaaggcaaagacgacgttaccggtgaagaactgactacccgtaaagatgatcaggaagagaccgtacgtaaacgtctggttgaataccatcagatgacagcaccgctgatcggctactactccaaagaagcagaagcgggtaataccaaatacgcgaaagttgacggcaccaagccggttgctgaagttcgcgctgatctggaaaaaatcctcggctaattcgaaagcgcgcacggacagtcccctcgccccctcggggagagggttagggtgaggggaacaggcccgcacaagcaaacttatcagcaatctcaggccggatattcattcggccttttacaaaaacctcaatctgcgctattcctttttctgatttgacctctcacagcaattagttcttcttcctcacttttccgctacaattatcaacaagttgaatcgataagaggcggtaatgcgtcagactaaaaccggtatcctgctggcaaacctgggtacgcccgatgcccccacacctgaagcggtaaaacgctatctgaaacaatttttaagcgacagacgcgtggttgataccagtcggttgttatggtggccattgctgcgcggcgtgattttgccgctgcgcagcccgcgtgtggcgaagctgtatgcctctgtctggatggaaggtggcagcccgctgatggtttacagccgccagcaacagcaggcgctggcacaacgtttaccggagatgcccgtagcgctgggaatgagctacggcagcccaagtctggaaagcgccgtagatgaactcctggcagagcatgtagatcatattgtggtgctgccgctttatccgcaattctcctgttctacggtcggtgcggtatgggatgaactggcacgcattctggcgcgcaaacgtagcattccggggataagctttatacgtgattacgccgataaccacgattacattaatgcactggcgaacagcgtacgcgcttcttttgccaaacatggcgaaccggatctgctactgctctcttatcatggcattccccagcgttatgcagatgaaggcgatgattacccgcaacgttgccgcacaacgactcgtgaactggcttccgcattggggatggcaccggaaaaagtgatgatgacctttcagagccgctttggtcgggaaccctggctgatgccttataccgacgaaacgctgaaaatgctcggagaaaaaggcgtaggtcatattcaggtgatgtgcccgggctttgctgcggattgtctggagacgctggaagagattgccgagcaaaaccgtgaggtcttcctcggtgccggcgggaaaaaatatgaatatattccggcgcttaatgccacgccggaacatatcgaaatgatggctaatcttgttgccgcgtatcgttaaagctgagcggtaaagaactgagcgccgtcgcgaagagcctcgtcggcggttttcatcatccgactataatgcaaaaaggcgtgcagcgtgcctgggtagagtttgaactcacagggctgctgatgcgccgctaacgtctggtaaagcagacggctgtcatccagcagcggatcgaactccgccccggcaataaaacagggcggaacttcgcgagtgagatcattattaaacagacagtaatacgggctctcgcggtccgcgtcgttgcttaaatatgcctcttcgtacatctgcaaatcctgttgcgttaagccatcccagacaccgcccaacagacgacgagtcacggaatcccgtaatccgtaaagcccataccacagcaaaacgcccgcaactttaccgcaatcgatctgtttatcacgcaaccacaacgcactggcgagcgccagcatggcacctgcggaatcaccggcaaagccaatgcgggacatattgatttgataatcctccgcctgctggtggaaataacaacaagcagccacaatttcctctatcgcttgcggaaaacgcgcttcaggactaagggtgtaatcaataccaatcaccgtacattggctgtagcttgccagcaggcgcatgatgcgatcgtgggtatcgagattgccgagaataaaaccgcctccatgcaaataaaatagcgtcgctgggctatctggctgcggacaaaagagacgtgtttccacctgcccatattttgttggaaccatgtaagctctggttgccatttctggagcgcccgcattccagaatcggcgctcaagcgtgtaatactgtcgttgctcagcaatcgttcccgttgcgggccagggcggtaaatccggctgaagagtattcacaacggtcttcatttcagcagaaataaggtccagaacaggtagtttgttttccggcttcatacaaaaactcctttcaaattacgtcattgtaaggaaccactgccatgaaaatgcgatcccgcctgctgatattgaaactggctgcgtctcgcgcgctcccgtcagattgtgttaacattcgccgctcagttaaccacccgtaaaaacaaccatgaaatttcccggtaaacgtaaatccaaacattacttccccgtaaacgcacgcgatccgctgcttcagcaattccagccagaaaacgaaaccagcgctgcctgggtagtgggtatcgatcaaacgctggtcgatattgaagcgaaagtggatgatgaatttattgagcgttatggattaagcgccgggcatagtctggtgattgaggatgatgtagccgaagcgctttatcaggaactaaaacagaaaaacctgattacccatcagtttgcgggtggcaccattggtaacaccatgcacaactacagcgtgctcgcggacgaccgtagcgtgctgctgggcgtcatgtgcagcaatattgaaattggcagttatgcctatcgttacctgtgtaacacttccagccgtaccgatcttaactatctacaaggcgtggatggcccgattggtcgttgctttacgctgattggcgagtccggggaacgtacctttgctatcagtccaggccacatgaaccagctgcgggctgaaagcattccggaagatgtgattgccggagccagcgcactggttctcaccagttatctggtgcgttgcaagccgggtgaacccatgccggaagcaaccatgaaagccattgagtacgcgaagaaatataacgtaccggtggtgctgacgctgggcaccaagtttgtcattgccgagaatccgcagtggtggcagcaattcctcaaagatcacgtctctatccttgcgatgaacgaagatgaagccgaagcgttgaccggagaaagcgatccgttgttggcatctgacaaggcgctggactgggtagatctggtgctgtgcaccgccgggccaatcggcttgtatatggcgggctttaccgaagacgaagcgaaacgtaaaacccagcatccgctgctgccgggcgctatagcggaattcaaccagtatgagtttagccgcgccatgcgccacaaggattgccagaatccgctgcgtgtatatagccacattgcgccgtacatgggcgggccggaaaaaatcatgaacactaatggagcgggggatggcgcattggcagcgttgctgcatgacattaccgccaacagctaccatcgtagcaacgtaccaaactccagcaaacataaattcacctggttaacttatagtagcttagcgcaggtgtgtaaatatgctaaccgtgtgagctatcaggtactgaaccagcatagtcctcgtttaacgcgcggcttgccggagcgtgaagacagcctggaagagtcttactgggatcgttaagttatcgtcggttcgtaggccagataaggcgttcacgccgcatctggcatttggctctcgatgcctgatgcgacgctggcgcgtcttatcatgcctacatatttttcatattttacatccggcaaccaccgtttaccccgtcaccacctcacccgccggtggcgtttccagcagttccagcatggtacgggcgatttcacgctcgcccatcactacctgattcgcaccacgttcggtgatatacgccacttcatcgtcataatgggcgcgggcaataatctcaatatccggatttttcgcgcgggcagatgccacaatctcacccgcttcataaccgttgggaatcgtcaggatcagccattttgcacattccagatgcgccagttgcataatttcttcgttcgccgcattgcccaatactgcgcggaccccgcgctctcgcagctcatcaacacgggttcgactcgtctcaatcaccaccagcggaatatcagaggcgagcaatttctcccccagcaggctgcctacacgaccgtaacccaccagtagcgcatggttgcaaatatccactgggatctgcttctcttcttcgattgcctcttccagcgtctgctcttccagcgtttcggtcttcgccagatatttctccagtagtgcgaacagtaccgggttgagcataatgctcaggatcgcccctgccagtaccaggttttgtccggcctgcggcagtaaattcaatgccattcccagtcccgccaggataaacgcgaactcaccaatctgcgccaggctggcggcgatggttaatgccgtacgttgggagtgaccaaacagtcgcaccaggaaaaatgcggctaagctcttaccaaacagaataatcgccagcgtcgccagcactgccagcggttgctgaatcagaattaacggatcaaacaacatcccgacggagacaaaaaacagcaccgcaaacgcgtcgcgcaatggcagcgtatcgtgggcggcacggtgactcagttcagactcgttcagtaccatcccggcaaagaacgcaccgagtgcaaaggagacatcaaacagctctaccgcaccaaaggcaacccctaacgccagcgccagcacgctcagggtaaacagctcgcgagaaccggttgccgcgctgcgtgccataatccacggcaccagacggcgacctaccagcatcataatggcgataaatgcgatcactttgccgatggtgatccccatatcgactgcaagagtggcaaagcccacatcgccctgttccatcattcctgccactgcgggcagcaacaccagcgtcagaaccattaccaggtcttccacaatcaaccaaccgatggcgatttgcccacgctgactgtcaattaattgccgttcttcaagtgcgcgcagtaacaccacggtactggcggtggaaagacataaaccgaacacgataccggtcattaagctccagcccagcacggcagagagcgccatacccagcagcgtcgccacggctatctgggcgatcgcaccgggaatggcgatggcctttaccgccatcaaatccttcaggctaaagtgcaaaccgacgccaaacatcaacagaatgacgcccagttcagccagttccggggcaagcttggtatcggcaacaaagcccggagtgaatggtcctgccagcacacccgctaacagatatcccaccagaggagaaatacgtagtttattggccagcatgccgaggataaaggcgagcacaaggccgccaacaatggtggtgataagcggggtggcgtgatgcattccgtctccttttcctggtggttattgtccatttttggccgggaaaaccaaaattacaggtaatagtttatgacaatttcattgatgatgttcatgaataattattgaattttgcagaaaaatggaattagctgcaaaaaaagcacggatcggaaaacagaaggcggtttaacagaggaaaggcttatggcgactgtaaaacgatgcagccaaagtttgcctttggctgcaatgaaatcagtctttatgccggttatcaggcaggaatatggtcaacatccccaatagtggcaggaaagcacagattttatagactaactcgatgctggtgtgatcggcgataagccccagaactgccgctcccagacctcccatgccaaaagcaaaaccgaaaaagagtccagaaaccataccgatacgtcctggaagcagctcctgagcgtagaccagaatggcagagaatgcgctagcgaggataaatccaataatcaccgttaaaacccccgtccagtgcaggctggcgtagggtaaaatcagcgtaaacggcgcaacgccgaggatagagccccaaatcacatatttccgcccaattttatcccctacaggcccgccgatcaccgtacctgccgcaacggcaaacaggaaggcaaacagatgaagctgagcattctggatagataatccgaatttttgcatcagataaaaggtgtaatagctgctgatgctcgccatatagaaatatttgctgaaaatgaggattaacagaatgctgaccgccagtacaactttattgcgcggcagtggattgataatcgtcgctttgggttttcctttattcattcggtgctgtgcgctgtaccaacggctgatttgcgccaacaccacgatcgccagcagtgccgcaagcacaaaccaggcaacgttgcctttgccataaggcgcgataatcaccgccgccagcaagggtcccagggaactgccaaagttgccgccgacctgaaagatagattgcgccaggccatgccgcccgccggaagccatacgggccacgcgagaagattccggatgaaagacgctactaccggtaccgaccagcgccgccgccagcagaactgcgccaaaactgcccgccagcgcaagcagcaccagaccgcttaaggtaaagcacatgccaattggcaagctccatggcatcggatatttatcggtccagtagccgaccactggttgcagtaggctagaggcgagctggaaggtgagggttatcatgccaatctgcataaatgtcagagaaaattcactctgaagcagcggataaatcgccagaatcaggctttggatcatgtcgttcagcagatgactgaggctgatagcacctaaaataccaaagcttgttcgggccttggtcgtactcgcagccgcgcccgccacaggctggggttgttcactcattgccataggaaagtcactttttcagggttgcgatgtaaagaatgatcttatttgtgattattaccagactaacatacctgtatgcgtcgtctgaaggaagtctcaacgccgaatacagaatttctaatctggatgcagatttatcttcaccggacgcagacttgtctatgatgtcgcgtcatactatttttcaacacgttgaaatcaggtcagggagagaagtatgaaattattgcagcggggcgtggcgttagcgctgttaaccacatttacactggcgagtgaaactgctctggcgtatgagcaggataaaacctacaaaattacagttctgcataccaatgatcatcatgggcatttttggcgcaatgaatatggcgaatatggtctggcggcgcaaaaaacgctggtggatggtatccgcaaagaggttgcggctgaaggcggtagcgtgctgctactttccggtggcgacattaacactggcgtgcccgagtctgacttacaggatgccgaacctgattttcgcggtatgaatctggtgggctatgacgcgatggcgatcggtaatcatgaatttgataatccgctcaccgtattacgccagcaggaaaagtgggccaagttcccgttgctttccgcgaatatctaccagaaaagtactggcgagcgcctgtttaaaccgtgggcgctgtttaagcgtcaggatctgaaaattgccgttattgggctgacaaccgatgacacagcaaaaattggtaacccggaatacttcactgatatcgaatttcgtaagcccgccgatgaagcgaagctggtgattcaggagctgcaacagacagaaaagccagacattattatcgcggcgacccatatggggcattacgataatggtgagcacggctctaacgcaccgggcgatgtggagatggcacgcgcgctgcctgccggaagcctggcgatgatcgtcggtggtcacagccaagatccggtctgcatggcggcagaaaacaaaaaacaggtcgattacgtgccgggtacgccatgcaaaccagatcaacaaaacggcatctggattgtgcaggcgcatgagtggggcaaatacgtgggacgggctgattttgagtttcgtaatggcgaaatgaaaatggttaactaccagctgattccggtgaacctgaagaagaaagtgacctgggaagacgggaaaagcgagcgcgtgctttacactcctgaaatcgctgaaaaccagcaaatgatcagcctgttaagtccgttccagaacaaaggcaaagcgcagctggaagtgaaaataggcgaaaccaatggtcgtctggaaggcgatcgtgacaaagtgcgttttgtacagaccaatatggggcggttgattctggcagcccaaatggatcgcactggtgccgactttgcggtgatgagcggaggcggaattcgtgattctatcgaagcaggcgatatcagctataaaaacgtgctgaaagtgcagccattcggcaatgtggtggtgtatgccgacatgaccggtaaagaggtgattgattacctgaccgccgtcgcgcagatgaagccagatagtggtgcctacccgcaatttgccaacgttagctttgtggcgaaagacggcaaactgaacgaccttaaaatcaaaggcgaaccggtcgatccggcgaaaacttaccgtatggcgacattaaacttcaatgccaccggcggtgatggatatccgcgccttgataacaaaccgggctatgtgaataccggctttattgatgccgaagtgctgaaagcgtatatccagaaaagcagcccgctggatgtgagtgtttatgaaccgaaaggtgaggtgagctggcagtaatccgaaagtgccggatgtttgcatccggcacaatgcttaatcgcggcgggcgatatcagcaaatttggcatcgaggatctttgccagatcgcctgccgccagttcgatatccagtccgcgcttgccgccggaaacataaatagtggcaaattcttgtgcgggggcgtcgataatcgttggcagacgttttttctgccccagtgggctaatccccccaaccaggtatcccgtgctacgctgcgcgaccatcggatcggccatctcaactttcttggcacccagcgcttttgctacttttttaagatccagttgacctgcgaccggcgtaacggccacggcaaggtgtttcatatcaccgttcactgccaccagcagcgttttgtagacctgatccggattcaaacctaattttttgacgacttcatcgccaaaattggtttcagccggatcgtgctcgtaggtatggatttgaaagctaatcttgttttttcgagtaatttaactgcgggtgtcatggtaattttcctgccttaaacaaaaaaacgaagcaagcatacgcctgatggcggtccaaaaaaaagagtcatcttgcctaagagtattggcaggatggtgagattgagcgacaatcgagttacaccgtcgcttaaagtgacggcataataataaaaaaatgaaattcctctttgacgggccaatagcgatattggccatttttttagcgcaacatttgcggcaaattcccttctccatacaggtgtagtgcaccgaccgcgaccacatatcgccccggcggcatggcgcgtaatttatcccgccaggcgagatttcgctgatgcatcagcacatcgtacaggctctgactgaacgtattgggcagcgttatatcattattttgcggcggtgcattcagccaccagctcatcatttgttgcagcaaccgtgcgttggtatgccagtgggtcagcgtatcgtccagcagcgccagtcctttgtcagggagctggagcaacatggcaatctggttttcagccccttccagttcaatcacgggtttatgttgttgcttcgccgcctgcaatagctggtaatcgataccgtattctgcccgcagccccagtttttgtgcctgcgtcgcctgaagaaccatcgcgatttgccacagcggttgggtagaaaagagactgggagaaatgcccatctcctggctaatgtgctgcaggttttggagttgctcctcgctaatgcgctcttccagcgcctcgcaggcaggcaaattagcaaaaggcgtatcgctggtggaaacatccgcctcgacgatcagcgcatcggcgtttttgagctttttgagcaaacgggtgggcaggggagccatatcgtggctacccatatgaatactgccaatcagatgaaaatggcgattgccggggagggtgatatcgatggcaggccaggtgtaatgattaccgcgcagcgcggcccaaagcgtttttacccggtacaacagatccatacgacctccctttgtgaaatatcatgctagcgcgcggtgagggatggcgcaaatggagttggagacttgtttaatgtgtttgtatgattcagtatgttcttgcatcgctattcacaaggaagcaacagttaaaaaccatgaaacaggcaacaagaaaaccgacgacacccggagatattcttctctatgaatatctggaaccgctcgatttgaaaatcaatgagttagcagagttgctgcatgttcatcgtaatagcgtcagtgcactgatcaataacaatcgtaaactcactactgagatggcatttcgtctggcgaaagtttttgataccacagtcgatttttggctaaacctccaggcggcggttgatctttgggaagttgaaaacaacatgcgcacccaggaagaattgggacggattgaaacagtggctgaatatttggcacgccgtgaagagcgtgcaaaaaaggtcgcgtaaggccaaaacatcgcttcatctcgtaggccggataaggcgttcacgccgcatccggcatccgagcaccattgcctgatgcgacgcttacccgtcttatcaggcctacaaacttgtgcctgaaccgtaggccggataaggcgtttacgccgcatccggcatccgagcaccattgcctgatgcgacgcttacgcgtcttatcaggcctacaaacctgtgcctgaaccgtaggccggataaggcgtttacgccgcatccggcagtcatgcgtcgatgccaaatgcgccaccctaaagcagcgcatccgcaatgatgtacttattccttcggtttaaaccgcagcaaccggttggcgttactcactacggtaatgctgctgagcgccattgccgctccggcaactaccgggttaagcagtgttccagtgaacggccacaaaataccggcggcgaccggaataccgatactgttgtagataaacgcaccgagcaggttctgcttcatgttgtgcagcgttgcgcgggaaatagcgagcgcatccgcaacgcccatcaggctatggcgcatcagggtaatcgccgcggtttcaatggcaacatcactgccgccacccatcgcaatgccgacatccgcctgagccagcgctggcgcgtcgttaatgccgtcgcccaccattgccacctaacgtccttcactttgcagatgtttgatcgcttcggctttaccgtccggcagcaccccggcgatcacctcatcaatccctgcttctttggcgatcgcattggcggtggttgggttatccccggtcaacatcaccagacgatatcccgctttatgcaggcgttgcagcgccgccacgctatcactacgcaacggatcgcgtactgccagcagggctaccgctttcccgtcaaccgccagcagcacaggcgttgccccttggcttgcctgagcagtaatctccgcttcgatagctttggtaccaacctgttgctcatttaacagcgcctgattgcccagcaataacgcatgaccttcagcttcaccgctcacgcccagcccgcgcaatgtgcggaaaccgttgacctgcggtagctgcatatcacctgctttatcgaggatcgctcgtgccagcggatggctggaaccttgctccagtgccgccgccagacgcaatgcctgcgcttcatcaacatcagcaaatgttttcactgcgacaacctgcggcttcccttcagtcagcgtcccggttttatcgaacactacagtgtcgagtgtactggcgcgttgcagcgcgtcagcgtcccgcaccagcacgccaaactcagccgcccgcccgacgccggaaataatgctcatcggcgtcgccagccccagcgcacacggacaggcaataatcagtaccgtggtggcaatcaccagggtatagacaatctgcggtgccggaccaaagaaataccagattgccgcactgacaagcgcaataaccaccactaccggcacaaatacggcactgattttatccgccagctgaccgatttctggcttgctgctctgggcctggcgcaccatgcgaatgattcgactcagcgtagtatggctgccaaccgcactggcacgaaacagcacactgccgtcctgtaccactgtcccggcatggacgctatcgccttcgcctttttgctgcgggattggttcgcccgtcagcatcgcttcatccagccatgcttcgccctgggtaatctcgccatctaccggcacgcgatcgccggtcgtcaggcgcagcaacatacctggctgcacttctgccagaggcacgcttttttcaccttcgtcagtaaccaggcgtgccgtcggcggggttaaatcgagtaacttttccagcgccttagaagaacgctggcgtgcgcgcgcttccagcatatggccgagattgatcagaccgataatcatcgcgctggcttcgtaataaagatgtcgcgcttccatcgggaaccactgcggccacaggttgacgctcatgctatagagccacgccacgccagtacccagcgccaccagcgtatccatcgtcgccgcaccgttcagcaggcttttccatgcactgcggtaaaaatggccgccggcgaaaaccatcactgccagggttatcaggccgataaccaaccacaggctgcggttgtcagcggtgaccatcatgttatcgccgatcatcccccagaccatcaccgggatacccaccgccagtgcgacaattgcctgccagcggaagcgcttcatcgtagcgacggcggtttcttgctggcgctcgcggcgtttagcgtcatcttcaatcgcttccgcgccgtagcccgctttttccaccgcctgcactaaatcttgtggggaggcactgcccatcaccagcgcagtacgctccgccaggtttacccgtgcctgagtgacgcccggtacgctttgcagcgcattttgtacgcgggtgacacagctggcgcagctcatgccgctcagcagcaactgctggctgtcatcgtcatcggcggtcgctgccggaagcgcctcagaaaccgctgtcagtgcttcgctcgggatactactctccgccagcggtttagcctttgggtggcttacagatgcgtcataacccgcttgtttgatggtttcgatcagctgttctgcactggcagtcccggtaacgtgcgcttcagtgatagacacatccgcctgctcaacatccggacgctgttcaagactttctttcacgcgtttaacgcagtgaccgcaggacaggccgtccagggtcaggtcgatagtttgactcataaaacactcctttaagacagttttgactggctgtgataaaggttaaaccttccagcaaggggaaggtcaagaaattaataaaccaggcgggtaaaagtccgtaaagattaaaaaatcggctcgatttgcatcaggattagacatttatctctttgttttcctgtagttaagttgcgggtgctaagttaaatcaggatgcctgaaaatcggcaccggggtgaggaattacctcccgcatctataaaaaggagttaacaaaagatgttagatgcaaacaaattacagcaggcagtggatcaggcttacacccaatttcacagtcttaacggcggacaaaatgccgattacattccctttctggcgaatgtaccaggtcaactggcggcagtggctatcgtgacctgcgatggcaacgtctatagtgcgggtgacagtgattaccgctttgcactggaatccatcagcaaagtctgtacgttagcccttgcgttagaagatgtcggcccgcaggcggtacaggacaaaattggcgctgacccgaccggattgccctttaacagtgttatcgccttagagttgcatggcggcaaaccgcttagcccactggtaaatgctggcgctattgccaccaccagcctgattaacgctgaaaatgttgaacaacgctggcagcgaattttacatatccaacagcaactggctggcgagcaggtagcgctctctgacgaagtcaaccagagcgaacaaacaaccaacttccataaccgggccatagcctggctgctgtactccgccggatatctctattgtgatgcaatggaagcctgtgacgtgtatacccgtcagtgctccacgctcctcaatactattgaactggcaacgcttggcgcgacgctggcggcaggtggtgtgaatccgttgacgcataaacgcgttcttcaggccgacaacgtgccgtacattctggccgaaatgatgatggaagggctgtatggtcgctccggtgactgggcgtatcgtgttggtttaccgggcaaaagcggtgtaggtggcggtattctggcggtcgtccctggagtgatgggaattgccgcgttcagtccaccgctggacgaagatggcaacagtgttcgcggtcaaaaaatggtggcaagcgtcgctaagcaactcggctataacgtgtttaagggctgatcatgatgaacacggaaggtaataacggtaacaaacctctcggtctatggaacgtcgtttccatcggcattggggcaatggtgggggcggggatcttcgcgctgctggggcaggctgcattgctaatggaagccagcacctgggtcgcctttgcttttggcggtattgtggcgatgttttccggttatgcctatgcgcgtctgggggcgagctatcccagcaatggcggcattatcgacttctttcgtcgcggattaggcaacggcgtctttagcctggcgctcagcttactgtacctgttgacgctggcggtgagcatcgccatggtcgcccgtgcttttggcgcttatgccgtgcagtttttgcatgaaggcagccaggaggagcaccttattttgctctacgcgttggggatcattgcggtgatgacgcttttcaactccttaagcaaccatgcggtagggcggctggaagtgatcctcgtcggcattaaaatgatgatcctgttattgctgattattgccggtgtctggagcctgcaaccggcgcatatttccgtctctgcgccccccagctccggtgcgttcttctcctgtattgggataactttccttgcctatgcgggctttggcatgatggcgaacgcggcggataaagtgaaagatccgcaggtcattatgccacgggcgtttctggtggcgattggcgttaccacgttgctttatatcagcctggcactggttttgcttagcgatgtaagcgcattagagttagaaaaatatgccgataccgccgtagcgcaggctgcttctccgctgctcgggcatgtgggttatgtgatcgtcgtcatcggcgctttactggcgacggctagtgccattaacgcgaacctgttcgccgtgtttaacatcatggacaacatgggcagcgaacgcgaactgccgaagctaatgaataaatccctgtggcggcagagtacctggggcaacattattgtcgtggtgttgattatgctgatgacggcggcactgaatttaggcagtctcgccagcgttgccagcgccacctttttgatttgctacctggcggtgtttgtggtggcgatccgcctgcgtcatgatattcacgccagcttgccgattcttatcgttggtacgttggtgatgttgttggtgatcgttggctttatctacagtctgtggtcccagggtagccgtgcgttgatatggattattggcagtctcttactcagccttattgtggcaatggtcatgaagcgcaataaaaccgtataacatctctctgtgcgcagtacttcctgtattattgtggtggcggtcgatattcgcactggcaaaaaaacgtgcttgaatatctgttgaaaccctttaacaaagcacaggaggcgttgcgcgaacgatgaacatcagcgatgtagcaaaaattaccggcctgaccagcaaagccattcgcttctatgaagagaaggggctggtgacgccgccgatgcgcagcgaaaacggttatcgcacctacacgcagcagcatctcaacgaactgaccttactgcgccaggcacggcaggtgggctttaacctggaagagagcggcgagctggtgaatctgtttaacgacccgcagcggcacagcgccgacgtcaaacggcgcacgctggagaaggtggcggagaacgaacgacacattgaggagctgcaatccatgcgcgaccagctgctggcactggcgaatgcctgccctggcgatgacagcgccgactgcccgattatcgaaaatctctccggctgctgtcatcatcgggcagggtgattaagagctgacggctcggatatgtagggttatcccttctatcgcaatgacttcaacatgcgtacctgcaccgagatcctcgctggcgctgacaggccaactactgtcaccgacgcgcatatgaccgcgcccgttgaccagcggagattccagcacaaaacgtcggccaatcagctgctgcccgcgctggtttaaatgactatcgctgtgcttttgttcgcgcacccgccggctcaaccatttccaccacagccaggcggcgagcagcgtcaggatggcaaacattaccccttgccactcccaacccagcggcaccagccagaccaccaggccggtaatcaccgctgccacgccgctccacaacaaataaccatttccgcccagcatctcggctgccagcagcaaaccgccgagactgagccagaaaatatgtggatgaacgaccattaactccatcatggctgagtccgtttgttggcgctgtctttcaccagctcggcaatcccggcaatgctccccatcaggctgctggcctctaatggcatcatcactactttgctgttactggaggaaccgatctgctgtaacgcttcggtgtatttctgcgctacgaagtagttcaccgcctgaatatcaccggaggcgatagcttcagacaccattttggtggcgcgggcttctgcttcggcggaacgttcacgcgcttcagcctgtaaaaacgcgctctgacgttcgccttccgctttcaggatttggctctgtttttcaccttcggctttgaggatttccgcctgacggatcccttccgcttcaagaatgtaagcgcgtttggtacgttccgctttcatctgcgcgttcatactagagataagctctgccggtgggcgcacgtcgcgaatttcaatacgggtgactttaatcccccacgggttggtggcttcatcgacaatacgcagcaggcgactgttgatgctgtcgcgctgagagagcatttcgtcaagttccatactacccagcacggtacggatgttagtcatggtcaggttgatgatcgccagctccagattgctgacttcataagccgcgcgcggcgcgtcaatcacctgaataaagcacacggcgtcgatggtaacgttggcgttatctttgctgataacttcctgggaagggatatcgagcacttgctccatcatattgatcttgcgaccaatgcgatccataaacggcaccaccagactgagccccggctgtaacgttttggtatagcgaccaaagcgttctactgtccactgatagccctgcggtacgattttgacacccgcgccgacaatgaccagcgcgacaaaaatgagaatcgggataaagataagcatcggaaaaacctcctgttgtaccgtccataatcagcaaaattgctgcttgattaaacaaattatacctgattactgaaagagagttcccccttattcctgcgaaggataaactgtttttagtaaaaatcagaaaaagggaacagcgatgcaggaaaatagtcctttgcttcagctacaaaacgtaggatatctggcgggtgatgcgaagattcttaataacatcaattttagcctgcgtgctggcgaatttaagttaattaccggtccttctggttgtggcaaaagtacgctgctaaaaatagttgctagtttgatcagcccaaccagcggaacgttactgtttgaaggtgaggatgtcagcacactaaagccagaaatctaccgccaacaagtctcttactgcgcccagacaccgacgctgtttggcgatacggtatacgataatctgatctttccctggcagatccgtaaccggcagcctgacccagccatttttctcgattttctcgaacgcttcgccttgccggacagcattttgacgaagaatatcgccgagctatctggtggtgaaaaacaacgcatcagtttgattcgtaacctgcaatttatgccgaaggttttattgctggatgaaataaccagtgcgctggatgaaagtaataaacataacgtcaatgagatgatccatcgttatgtgcgcgagcaaaatattgccgtgctgtgggtgacacacgataaagacgaaattaatcatgcggataaagtgattacactgcaaccgcatgccggagaaatgcaggaagcacgctatgaactcgcataactaaagaaatgcaggaagcacgctatgaacagccataatattactaacgaaagtttagcactggcattaatgctggtggtggtggcaatcttaattagccataaagaaaaactggcgctggagaaaaatattctctggagcgtcgggcgagcgataattcagctgattattgtcggctatgtgctgaagtatattttcagcgtggatgatgccagcctgacattattgatggtgttatttatctgctttaatgcggcgtggaacgcgcaaaaacgcagtaaatatattgctaaagcttttatcagtagctttattgccattacggtcggggcgggaattaccctggcggtgctgattctcagtgggagcattgaatttatcccgatgcaggtgatccctatcgccgggatgattgccggtaacgccatggtagcggtggggttgtgttacaacaatttagggcaacgggtcattagcgaacagcaacagattcaggagaaactgagtcttggtgcgacgccgaagcaggctagtgcgatattgattcgcgacagtattcgcgcggctttaattccgacggtcgatagtgcaaaaacggttggcttagtgagtttaccaggaatgatgtccgggctgatatttgccgggattgatccggtgaaggcgattaaatatcagattatggtgacctttatgctgctcagtaccgccagcttgagcaccattattgcctgctatttaacctatcgtaagttttataatagccgccaccagttggtggtgacgcaattgaagaagaaatgatgcgatgccggatgcgcagcatcgcatccggcgttgtggttcatgtgccgatcaacggaatatcaatacaacaatgcatacagctggcggcgatacttgctcgccagtgcatcacccgtacccagcgcagcgaggatctcctggaacgttttacgcgtctgaccgtctgcggcggtgagatctttacgcagatgcccgaacagcaactccagcgcctcttcattgcgcccaacctgatgcagttgcagcgccagttgcgtcgccagtgcggcatcttctggattctccgccacctgctgttgcaactgttgaatttccggcgtatcagccgcctgcttcagcagttcgatttgcgccaccagcccctggtagcgggtgtcctgatcctgcaacggaatggttttcagcaccgcttccgcatcttcagaacggttcagcgcaatcagcgtttctgccagcagcaggccgatctccccgttctgattgctcaactgccaggcgtctttcagcaatggcagggcatcggtgtaattgctttcctgcatcagttgcatcgcctgctgcgctttcagctcttcttcgcgcggcagcactttatccagcagggcgcggatcgcctcttccggttgcggcccctggaagccatctaccggttgcccgttctggaacagatacacggtcggaatcgcacgcagaccaaactgcgcggcaatcatctgctccgcgtcgcagtccagcttcgccagaataaattgcccgttgtactgcgccgcgaggctttccagaattggggttaactgcaaacagtgctggctacgttcagaccaaaaatagaacagcaccggagtggtcatgctctgttcaagaacctgttgcaggttagattcgttaatgttgacaatattttctacggacatggagtcgctctctgttgtcgatattttctttgacatgggggcttaagcgcgcgcttcaactcacccctgcaatattttgtccatcacgcgccccggcagcaggcgcttaagcaccattaccgcccaggtcaccagcgtcaccggatagcgcatcttcggcttctcgctaataaaagcatggcgtactttgtccaccaccgcttccggtcccaacgtaaagcgggcggcgatgccgggattttcgactggtttatcactttgcgtctggttgacgttgtcggtgaagcgagtacgaatgggaccgggttcgatcaggctgactttaattccgctgtggcgcagctccatgcgcagtgcatcactccacgcctccagcgcatatttactggccgcgtaagcgccacgacccggcgtggagattaatcccatcacgctacttgtcatcacaatacgcccttcaccgtgcggtaacatcgcgggtaacaggcgcatggtgagctggtgtgcgccgaaaaagttggcggaaaactgctgttccatctgcgcacggctgatggtggaaagggggccatacatgccgaatccggcattgttaaagatcccatacagacaattatcggtcagggcgatcacctcgtcggctgcgcgatcaacactttctggactatccagatcgatcaacacgccggtaaatcccatgctgttcatgcgctcaacatcatccggtttccggcaacctgccagcacatgaaaaccctggcgttttaattcgagcgcgctttccaggccaattccactggaacatccggtaattaagacgcttttttgcataactttacctgtcaggatctccgttgctttatgagtcatgatttactaaaggctgcaacttatttaactgtcatgatttactaaaggctgcaactgcttcgccatccagtcggcaataaacggctgggcgtcgcggttgggatgaataccgtcatcctgcatccattgtggcttgaggtagacctcttccataaaaaagggcagcagcggaacatcaaactctttggcgagtttggggtaaatggcgctaaaggcttcattataacggcgaccatagtttgcaggcagacgtatttgcattaacaatggttcagcgttggcggctttgacatcctgcaaaatctggcgcagcgtttgctcggtttgctgtggctgaaaaccacgcaaaccgtcattgccgcccagttcaaccagcacccaacgcggctgatgctgtttcagcagagccggaaggcgcgccagtccttgttggctggtgtcgccgctgatgctggcattaactacgctcgttttactctgccacttatcattcaacaaggcaggccaggccgcgctggcagacattcgatacccggcgctcaggctatcacccagaatcaataacgtgtccgctgcggcggcacggaaggttaacaggaccaggaacaggaagggcaaatgccagcggaaaacattgttgaagttcatcatcttaagaagtccgtcggtcagggggagcatgaactctccatcctcaccggagttgagctggttgtcaaacgtggcgagaccatcgcactggtgggcgagagcggaagcggtaagagtaccttgctggcgatcctcgccgggcttgatgacggcagcagtggcgaagtgagtctggtgggacaaccgctacataatatggacgaagaagcgcgggcaaagttgcgcgcgaagcacgtcggctttgtttttcagagttttatgttaattcctacccttaacgcgctggaaaacgtcgagcttccggctctgctgcgcggtgagagtagcgcggaaagtcgtaacggggcgaaagcgttgctcgaacagttagggctgggtaaacgtctggatcatcttccggcacagctttccggcggtgaacagcaacgagtggcgctggcacgagcctttaatggtcgacctgatgtgctgtttgccgacgaacccaccggcaaccttgaccgccagacgggcgataaaattgccgacctgctgttttccctcaaccgtgaacatggcaccacgttgattatggtgacccacgacctgcaactggcggcacgctgcgaccgctgcttacggctggtgaacgggcagttgcaggaggaagcatgattgcacgttggttctggcgcgaatggcgtagcccgagcctattaattgtctggctggcgctaagcctggcggtggcctgcgtgctggcgctgggcaatatcagcgatcgcatggagaagggcttaagccagcaaagccgtgagtttatggcgggcgatcgggcgttgcgcagtagtcgcgaagtgccgcaagcgtggctggaggaagcgcaaaagcgcggcctgaaagtcggcaagcagctgactttcgccacaatgacctttgcaggcgacacaccgcagctggcgaacgtcaaagcggtggatgatatctacccgatgtatggcgatctgcaaactaatccccctggcctgaaaccgcaggcgggcagcgtattgctggccccacgcctgatggcactgcttaacctgaaaacgggcgacaccattgacgtgggcgatgccaccttgcggattgccggagaagtgattcaggaaccggattccggttttaaccccttccagatggctccgcgtctgatgatgaatctggcggatgtcgataaaaccggagccgtgcagccggggagtcgggtcacctggcgttataaattcggcggcaacgagaaccagctcgacggctatgagaaatggttgttacctcagcttaaacccgaacaacgctggtacggtctggaacaggacgaaggcgcgctggggcgaagcatggaacgcagccaacagttcctgctgcttagcgcgcttctgaccttgctgctggcagtggcagcggtggcggtagcgatgaatcattactgtcgcagtcgctacgatctggtggcgatcctcaaaacgctgggggcagggcgagcgcaactgcgtaagctaatcgtcggtcagtggttgatggtgctgacgcttagtgccgttaccggtggggccataggcctgttgttcgaaaacgtgttgatggtgctgctcaagcccgttctgcctgctgcactaccgccagccagcctctggccgtggctgtgggcgcttggcaccatgacggtcatcagcctgctggtggggctacgaccatatcgcttgttgctggcaacgcagcctttacgcgtattacgtaatgatgtggtagcgaacgtctggccgctgaagttttatctgccgattgtcagtgtggtggttgtgctgctgctcgccggattaatgggtggcagcatgctgctttgggcggtgctggcgggcgcggtagtactggctttgctgtgcggtgtgctgggctggatgctgctgaatgtacttcgccgcatgacgctgaaaagcctgcctctgcgcctggcggttagccgcctgttacgtcagccgtggagtacgttaagtcagcttagcgcatttagcctctcctttatgctgctggcactgctgctggtgttgcgtggcgatctgctcgaccgctggcagcagcagctacctccagaaagcccgaactactttttaattaacatcgccacagaacaggtagcaccgctaaaagcgttcctcgcggaacatcagatagtcccggaaagcttttatccggtggtgcgggcgcggctgacggcgattaacgataagccgacagaaggtaatgaagatgaggcgcttaaccgcgaactcaatcttacctggcaaaatacgcggcccgatcataatccgattgtcgccggtaactggccgccaaaagccgatgaagtgagcatggaagaggggctggcgaaacgcttaaacgttgccctcggtgataccgtgacttttatgggcgatacccaggagttccgcgctaaagtgaccagcctgcgcaaagtggactgggaaagtctgcggcctaatttctattttattttccctgaaggggcattagacgggcaaccgcagagctggcttaccagtttccgctgggagaatggcaacggcatgttgacacaactcaaccgccagttcccgaccattagcctgttagatattggcgcgattttaaaacaggtcggtcaggtgctggagcaggtaagtcgggcgctggaagtgatggtggtactggtcaccgcctgcggtatgttgctgttgctggcacaggtgcaggtgggaatgcgtcagcgtcatcaggagctggtggtgtggcgcacactcggtgcggggaaaaaactgctgcgtaccacgttgtggtgtgagttcgccatgcttgggtttgtttccggcctggtggccgcaattggtgcggaaacggcgctggcagtgttgcaggcgaaagtgtttgattttccgtgggagccagactggcgattgtggattgttctgccgtgcagcggagcgctgctgctgagccttttcggcggctggctgggtgcgcgactggttaagggtaaggcgctgttcaggcagtttgcggggtgatgagagtccctcattaccgcgccttaacccattccgccacttccgcccactcaccgcgaaagacaactttttccgcttttttctcaagctgatagcgatacatcgggtcgtaatattcttcaagtaacggcaccagccaggccagatgaccgtcggtgctgccggtggtgagttgcgttgtcagtgctgcatccagccttgcagccagttcgttatagcgctgtagccccagccgacgcttaatcgcgctaagtccgtgatgcaggtattcgcaatactcctgccagccctgttcgtcgccgtacgcgtgggtaaaatcatgatgcatacgcaagaaatactcttcgttcaggcgctcaagacggatctcaaacggatcttctaccaccgcaatcgccgcctgagtcattcgctcgcgcaggcattccggcaggtgattgctaccgatcatccggctttcgtcttccagcacccacaggcgcaaattctgacgggcgtcggtttttagcatttcggcagccagcaggttttcaaaactcgcctggctaagttgtggttgtaacgtgcgaccaaacgcgctaccgcgatgacgcgccaacccttccagatcaacaccgttcggctgttgctgcactaacagcgttttaccgctgccggtacaaccgccaatcagcactatcggtttttgtgccagttcaatagtcgcctgaatcgcggtctggcgcagtgccttataaccgccttccaccagcggataatcaatccccgctgcatgcaaccagctttgcacaatatgactgcgctgaccgccacgggcgcagcagagaataccttgcggattttgcaggcacgctgcccgccaggcgtccatgcgctgctgacgaatttcacccgccaccagtttatgtcccagcgccagcgctgcgtcactgccttgctgtttatagcaggtgccaacggcggcgcgttcatcgttattcattaacggcagattgatagcggcgggcattgcgccgtgctcaaactcgataggggcgcgaacatcaataatgggcgtatcagcaatcagcagggcacgatagtcctgttccgtgtgtctctcttgcatagttaaaagtgaacctcaaatcagcttgcgcgctattttacgcgccaacgcgcaaggaaacttgatttttaactgcgtgggttgccgaaaatttctaaaaatccgctgatttccggcctgcgctgggtaaacaaggtcacaatatcttctaccgctttgccgctgccaaatttgcgccatgccagactcaatgggctaggagggcgcatcgttgggattacccggctgaccagttgttgattatcgatcatactctggcaaaggctttttggcaaaaaaccaatgccaacgcccgccagatgggcggcgattttcgtttccatatcgggaacaataatctctttttgccctggcaatcgccaggcgacgcgtttggttaaggtgcgggcgctgtcttcaatattgaccgccggaaagcgccgcaactgcgcttctgttagcggctcttcaacgttcgccagcggatgatccgccgccatgacaaagcgccattgcacgcttcctaagggatcaagactaaaggtatttgccagcgcctcagttcccgtgacgccgatagccaggctaaaaccttcgtacaataggctgtcccagacgcccatatagatttgtcgggagatgtgaaactgggtaaaggggtaacgctcattcagccacgccagcaactgggcgacggcctgggggttatagagcaggttgttgatgacaatattcacctggcgttccacgccatcattcacctgttgcagctcgcttggcatactttccagccagctcagccagtctctggcctgggaaagtagatgctcgccagccgctgtcaacgtcacgctgcgagtcgtacggaaaaacagcgctactccggtattctcttccagaagtttaatgcgataactgatcgtcgccgtggttttacataatcgttctgccgctttactaaaacttcctgtttcagcaaccgcaatgaaagtccgcaaggtttctggatcgaacatcttcaggtatccccttttaaatccgcaagttgcgtgattttcttatcctctgatttatcagtatttttacatgataaccctgttcaatttgtggactaaatctagttttggaaaaatattccaacttttgtattgatgttgttctcttaaggttttagattgcctgttattgaaaccaagctgaccggtcggcggtggttgaacggaattatgttacaaggacaaaaagatgaaacttcaggtattaccgttaagtcaggaagcctttagtgcttatggcgacgtaatcgaaacgcagcaacgggattttttccatattaacaatggcctggtggagcgttaccacgatttggcgctggttgagattcttgagcaagactgtacgcttatcagcattaaccgcgcgcaaccggcgaatctgccgctgaccattcacgaactcgaacgtcatccgctgggtactcaggcctttatcccgatgaaaggtgaggtgtttgtggtggtcgtggcgttaggtgacgacaaaccagacctgagtacgctgcgggcgtttatcaccaacggcgaacagggagtgaattaccatcgtaacgtctggcatcacccacttttcgcctggcagcgcgtcaccgattttctgaccatcgatcgcggcggcagtgacaactgtgatgttgaaagtattcctgaacaggaactctgttttgcgtgacgcctgcaaccgacttgcataagataaactaattgttcattgtttatgctcacttgtaggtcggagttaacgtaggtatgacggaagttagacggcgcggcaggccaggacaggcggagcctgtggcacagaagggcgcacaggcgttagagcggggaattgcgattctgcaatatttggaaaaaagtgggggaagtagcagcgttagcgatatttctctcaatctggatttgccgctctccacgacctttcgcttgctgaaggttttacaggcagcggattttgtctatcaggacagtcaattaggctggtggcatataggattaggtgtctttaacgtcggtgcggcgtacatccataaccgcgatgtcctctccgtcgccgggccgtttatgcgccgcctgatgttactttccggcgaaacggtcaatgtcgcgatccgtaacggcaatgaagcggtattaattggtcagttagagtgtaaaagcatggtcaggatgtgtgcgccactgggcagtcgtctgccactgcatgcttccggtgcgggcaaagcgctgctttatccgctggcggaagaggagttgatgagcatcattctgcaaaccggtttgcagcagtttacgccaactacgcttgtggatatgcccaccttgctgaaggacctggaacaagcgcgtgaactgggctataccgtagataaagaagagcatgttgtaggtctgaattgcatagctagtgcaatttacgatgatgtcggtagtgttgttgccgctatctccatctccgggcctagtagtagactgacagaagatcgttttgtcagtcagggtgagctggtcagagacaccgcccgcgatatcagcacggcgttgggactgaaagcacatccataatgtctgtcgcatcccgctctgcggagcgggtttttttgacaaaatttgaaagttggaaaaattttccaataaatagaggtaggaataaaatggcaaaaatgagagccgttgacgcggcaatgtatgtgctggagaaagaaggtatcactaccgccttcggtgttccgggagctgcaatcaatccgttctacagtgcgatgcgtaagcacggcggtattcgtcacattctggcgcgtcatgtggaaggtgctagccacatggcggaaggttatacccgcgcaacggcagggaatatcggcgtatgtctggggacttccggtcctgcgggcacggacatgatcaccgcgctctattccgcttctgctgattccattcctattctgtgcattaccggccaggcaccgcgcgcccgtctgcataaagaagattttcaggccgtagatattgaagcaattgctaaaccggtcagcaaaatggcggttacagttcgtgaagcggcgctggtgcctcgcgtgctgcaacaggcatttcacctgatgcgttctggtcgtccgggtccggtactggtggatttaccgttcgacgttcaggttgcggaaatcgagtttgatcctgacatgtacgaaccgctgccggtctacaaacctgctgccagccgtatgcagatcgaaaaagctgtagaaatgttaatccaggccgaacgtccggtgattgttgccgggggcggggtaattaatgctgacgcagctgcactgttacaacagtttgctgaactgaccagcgttccggtgatcccaacgctaatgggctggggctgtatcccggacgatcatgaactgatggccgggatggtgggtctgcaaaccgcgcatcgttacggtaacgcaacgctgctggcgtctgacatggtgtttggtatcggtaaccgttttgctaaccgtcataccggcagcgtagagaaatacaccgaagggcgcaaaatcgttcatattgatattgagccgacgcaaattggtcgcgtgctgtgtccggatctcggtattgtctctgatgctaaagcggcgctgacactgctggttgaagtggcgcaggagatgcaaaaagcgggtcgtctgccgtgtcgtaaagaatgggtcgccgactgccagcagcgtaaacgcactttgctgcgcaaaacccacttcgacaacgtgccggtgaaaccgcagcgcgtgtatgaagagatgaacaaagcctttggtcgcgatgtttgttatgtcaccaccattggtctgagtcaaatcgctgcggcacaaatgctgcatgtctttaaagaccgccactggatcaactgtggtcaggctggtccgttaggctggacgattccggctgcgctaggggtttgtgccgctgatccgaaacgcaatgtggtggcgatttctggcgactttgacttccagttcctgattgaagagttagctgttggcgcgcagttcaacattccgtacatccatgtgctggtcaacaacgcttatctggggctgattcgtcagagtcaacgcgcttttgacatggactactgcgtgcaactcgctttcgagaatatcaactccagtgaagtgaatggctacggtgttgaccacgtaaaagtagcggaaggtttaggttgtaaagctattcgggtcttcaaaccggaagatattgcgccagcctttgaacaggcgaaagccttaatggcgcaatatcgggtaccggtagtcgtggaagttattctcgagcgtgtgaccaatattagcatgggcagcgaactggataacgtcatggaatttgaagatatcgccgataacgcagcggacgcaccgactgaaacctgcttcatgcactatgaataagggagataaataatgttacgtttctctgctaatttaagcatgttatttggagaatatgattttctcgcccgttttgagaaagctgcgcagtgtggttttcgcggcgttgaatttatgtttccttatgactacgacattgaagaattaaaacatgtgctggcgagtaataaactcgaacatacgctgcacaatttaccggcgggtgactgggcggcgggggagcgcggtattgcctgtattcctggccgtgaagaagagtttcgggatggcgtagcagcagcgattcgttatgcccgtgcgctgggtaataaaaaaattaactgtctggtcggtaaaacgccggctggtttcagcagtgaacagattcacgcaacgcttgtagaaaacctgcgttatgccgcgaatatgctgatgaaagaagatattttattactgattgaacctattaaccattttgatattcctggtttccatctcaccggaactcggcaggcgctgaaattgattgatgatgttggttgctgcaatttgaaaattcagtatgacatttatcatatgcagcggatggaaggtgaattaaccaacaccatgactcagtgggctgataaaattggtcacctgcaaattgccgataatccgcatcgcggcgaaccgggaaccggagaaattaattatgattatctctttaaggtaatcgaaaattctgactacaacggttgggttgggtgtgaatataaaccccaaaccaccacggaagccggtttacgctggatggatccgtaccgttaaaacgtaacgctattcagacaatgcttttttaggccgctaagttggcaggggatcgtgttgtctgaattcaggaaaagcgaaatttaaaagaggttaattatgaaactgggatttattggcttaggcattatgggtacaccgatggccattaatctggcgcgtgccggtcatcaattacatgtcacgaccattggaccggttgctgatgaattactgagtctgggtgccgtcagtgttgaaactgctcgccaggtaacggaagcaagcgacatcatttttattatggtgccggacacacctcaggttgaagaagttctgttcggtgaaaatggttgtaccaaagccagcctgaagggcaaaaccattgttgatatgagctccatttccccgattgaaactaagcgtttcgctcgtcaggtgaatgaactgggcggcgattatctcgatgcgccagtctccggcggtgaaatcggtgcgcgtgaagggacgttgagcattatggttggcggtgatgaagcggtatttgaacgtgttaaaccgctgtttgaactgctcggtaaaaatatcaccctcgtgggcggtaacggcgatggtcaaacctgcaaagtggcaaatcagattatcgtggcgctcaatattgaagcggtttctgaagccctgctatttgctagtaaagccggtgcggacccggtacgtgtgcgccaggcgctgatgggcggctttgcttccagtcgtattctggaagttcatggcgagcgtatgattaaacgcacctttaatccgggcttcaaaatcgctctgcaccagaaagatctcaacctggcactgcaaagtgcgaaagcacttgcgctgaacctgccaaacactgcgacctgccaggagttatttaatacctgtgcggcaaacggtggcagccagttggatcactctgcgttagtgcaggcgctggaattaatggctaaccataaactggcctgatacccgcaataaaaatggccgatatcagaaaatgaatcggccagcaatattaaaaaagaaagcagccaaagatgttgctagtgtattaaaaataatatttttattttatttgttcctcatagctagattaaaacaacgttatagcatacgtgaaattaagagggatttatggaacatcagagaaaactattccagcaacgcggctatagcgaagatctattgccgaaaacgcaaagccagcggacctggaaaacatttaactattttaccttatggatgggtagcgttcataacgttcccaattatgtgatggtcggcggcttttttattctcggcttgtctacctttagtattatgctggcaattatcctcagcgcctttttcattgccgcggtaatggtattaaacggtgctgcgggcagtaaatacggtgtgccttttgccatgatcctgcgtgcttcttacggtgtacgtggtgcactgtttcccggattattaaggggcggaattgccgccatcatgtggtttggtttgcaatgttacgcggggagtctggcctgcttgattctgattggcaaaatctggccgggatttttaactctcggtggtgatttcactctgttaggcctttctctaccgggcttaattactttcttaatcttctggctggtcaacgttggtataggttttggcggtggcaaagttttaaataaattcactgccattcttaacccgtgcatctatatcgttttcggcggtatggcgatttgggcgattagtctggtcgggatcggtccaatctttgactacattccgagcggtattcagaaagcagaaaacggtggcttcctgttcctggtggtgattaacgcggtagttgcggtctgggcggcaccggcggtgagcgcatccgactttacgcaaaacgcccacagctttcgtgagcaggcgctggggcaaacgctgggtttagttgtggcctatattctgtttgcggtcgccggggtatgtattattgccggagccagtattcactacggcgctgatacctggaacgtgctggatattgttcagcgttgggacagcctgttcgccagcttctttgcggtactggttattctgatgacaactatctccactaacgcgaccggtaatattattccagccggttatcagattgccgccattgcaccgacaaaactgacctataaaaacggcgtactgattgccagtattatcagcttgctgatctgcccgtggaaattaatggaaaatcaggacagcatttatcttttcctcgatattatcggcggaatgcttggtccggtaattggtgtcatgatggcgcattattttgtggtgatgcgcggacaaattaatcttgatgaactgtataccgcacctggcgattataaatattacgataacggttttaacctcactgcgtttagtgtaactctggtggccgttattttatctcttggcggtaagtttattcactttatggaaccgttaagccgtgttagttggtttgtcggcgtcatcgtcgcctttgcggcctacgccttattaaagaaacgtacaacagcagaaaaaacaggagagcaaaaaaccataggttaattaatcccgatattgaacattgagttaaaaaccaatctgtattttacaaggagtttgttatgtcttttgatttaatcattaaaaacggcaccgttattttagaaaacgaagctcgcgttgtagatatcgccgttaaaggcggaaaaattgctgctatcggtcaggatctgggcgatgcaaaagaagttatggatgcgtctggtctggtggttagcccgggcatggttgatgcgcacacccatatttctgaaccgggtcgtagccactgggaaggttatgaaaccggtactcgcgcagcggcaaaaggtggtatcaccaccatgatcgaaatgccgctcaaccagctgcctgcaacggttgaccgcgctagtattgaactgaagttcgatgccgctaaaggcaagctgactattgatgcggcacaactcggtggcctggtgtcttacaacatcgaccgtctgcatgagctggatgaagtgggcgttgtcggcttcaaatgcttcgttgcgacctgtggcgatcgcggtatcgacaacgacttccgtgatgtaaacgactggcagttcttcaaaggtgcgcagaagctgggcgaactgggtcagccggtgctggtgcactgcgaaaacgcgctgatttgtgacgaactgggcgaagaagcgaagcgtgaaggtcgcgtaaccgctcatgactatgtggctagccgtccggtatttaccgaagtggaagcaattcgccgcgtactgtatctggcgaaagttgctggttgccgtctgcacgtttgccacgtcagcagcccggaaggtgttgaggaagtgactcgtgcacgtcaggaaggtcaggacgttacttgtgaatcctgcccgcattactttgtactggataccgatcagttcgaagaaatcggtactctggcgaagtgtagtccgccgatccgcgatctggaaaaccagaaaggcatgtgggaaaaactgtttaacggtgaaatcgactgcctggtttccgaccactctccatgcccgccggaaatgaaagccggtaacatcatgaaagcatggggcggtatcgccggtctgcaaagctgcatggacgtgatgttcgatgaagcggtacagaaacgcggtatgtctctgccaatgttcggcaaattaatggcgactaacgcagcagatattttcggtctgcagcaaaaaggccgtatcgccccaggaaaagatgccgacttcgtcttcattcagccgaatagcagctatgttcttaccaatgacgatctggaatatcgccacaaagtcagcccgtatgttggccgtaccattggcgcgcgtatcacgaaaaccatcttacgtggtgatgtgatttacgacattgaacagggcttccctgttgcgccgaaaggtcaatttatccttaaacatcagcagtaatctggcccctgcaatgcccgtccttgcggcgggcattctccggttaaggtgtgtttatgttcaattttgcagtcagccgcgaaagcctgttaagtggatttcagtggtttttctttattttttgcaacacggttgtggttcctcctacgctactttctgcttttcagttgccgcaaagtagcctgcttacgctcacgcaatatgcttttcttgctaccgcactggcctgcttcgctcaggcgttttgcggtcatcgtcgcgctattatggaagggccaggtggcctgtggtggggaaccatccttactatcacccttggtgaagcaagccgcgggacaccgatcaacgatatcgccaccagcctggcagtggggattgcactctccggcgtgctgacgatgttgattggttttagcggattaggccatcgcctggcacggttatttacgccgagcgtgatggtcttgtttatgttgatgctgggcgcgcagctgaccactatctttttcaaaggtatgctcgggctgccgtttggcatagccgacccgaattttaaaattcagttaccgccgttcgcgctcagcgtggcggtgatgtgcctggtactggcgatgattatcttcctgccgcaacgttttgcccgttatggcctgctggtcggcaccataaccggctggttgttgtggtacttttgctttccttctagccacagcctctccggtgagttgcactggcagtggttcccgctcggcagtggcggtgctttgagcccgggaattattctgacggcggtgattacaggtctggtaaatatcagcaatacctacggtgcgattcggggcacggatgttttttatccgcagcagggcgcagggaatacgcgttatcgtcgtagctttgtggcgaccggatttatgacgctgataaccgtaccgctggcggtaattccatttagtccgtttgttagttccattggtttattaacccagactggcgattacacgcggcgtagctttatttatggcagcgttatttgcctgctggtggcgctggttcctgcactcacgcgactgttttgcagtatccctttacccgtgagtagtgcggtcatgctggtttcttatctgcctttactcttttccgcgctggtgtttagccagcaaataacgtttaccgctcgcaatatttatcgactcgcattgccgttatttgtcggcatatttttaatggcattaccgcctgtgtatctgcaagaccttccattaacgcttcgtcctctgctcagtaacggcttattggtcgggattttactggctgttcttatggataaccttattccgtgggaacgcatcgaataatttgttgaaaaaggattgataatgaagattgtcattgcgccagactcttttaaagagagcttaagtgcagaaaaatgttgtcaggcaattaaagccgggtttagcaccctctttcccgatgcgaactatatctgtttgccgatagcggatggcggcgaagggacggtggatgcgatggtcgccgcgacgggcggcaacatcgtgacgcttgaagtctgcgggccgatgggcgaaaaagtgaatgctttttatggccttaccggcgacgggaaaacggcggtgattgagatggcggcagcaagtggcctgatgctggtcgcgcctgaaaagcgtaatccgttgctggcctccagttttggtacgggggagttaattcgtcatgcgctggataacgacattcgccatattattctcggcattggcggcagtgcgacggtcgacggcggtatgggcatggcgcaggcgctcggtgtgcgtttccttgatgccgacggtcaggcgctggcggcaaacggtggtaatttagcgcgcgtggcaagcattgagatggatgaatgcgatccgcgtctggcgaattgccatattgaagtagcatgtgacgttgataacccgctggtaggggcacgcggcgcggcggcggtgtttggcccgcaaaaaggggcaacgccggagatggtcgaagaacttgaacaggggctgcaaaattacgcccgtgttttacaacagcaaactgaaattaatgtctgccagatggcgggcggcggcgctgcgggcggtatgggtattgcggcggcggtatttctcaatgcggatattaaaccgggcattgaaattgtgttgaatgcggtcaatcttgcgcaggcagtgcagggcgcagcactggtgattaccggggaagggcgcatcgacagccaaacggcaggcggtaaagcgccgctgggtgtggcgagcgtggcgaagcagtttaatgtaccggtgattgggattgctggcgtattgggtgatggcgtggaagtggtgcaccagtacggcattgacgcggtattcagcattttgcctcgtctggcacctttagccgaagtgctcgccagcggtgaaaccaatctcttcaacagcgcgcgaaatattgcctgcgccattaaaataggtcagggaattaaaaactaacccttacctttaaagcggatgcgatttatatcgcataagagtgcagtactcatgccggatgcggcatgagtaccatatccttcctgaaaatcgcgcaaattctatatattgcagagatcatgtaggcctgataagcgaagcgcatcaggcaatgttacaaaaaaagccacggtataaaccgtggcaaaatccaacatagctaaaaataatcaggcgagtggtatgacttaaatctctacgtcgcggttacaatctttgctgtaaatatagctgaacgcttcaccacgccctacaccataaccagcctgtaaagaataagcgcccataaagatgtaatcgccttttttcaccgggatccagttattgtcgaggttataaaccccctgaccggaaagaatataggcaccgtgttcctgaacgtgtgtttcgatataaccgtggctggcacctggtgcaaaagagaggatatgcatgttcatatcaaaacctaactctttgggcagaaaatccagcagaataacatcgtccatgccttcataatgaatgcgttccagttcgctggcattgccagaaaccagccacggtgcatagccttctaccggaacatagcggcgcttatataaaaagatttggctgtcttcggcctgggcgttaacaaacgtcattaaggagcctggcgggcaataaagatagccaccttcgcttaaggcaaatgttttgccttcggctttggcagtgatatttccagagatcacatacaggaacgtttcaatgccttcgccaccgaagccctgttggttgccaccgttttgatgcagtgtgaccagataatcaacaaaagaggcacccagctttggcgtggagaggattgtcgcgtcacaattttcaaagcccggaataatattttttaccagaccatccggggttaacagtgcgaaattaccgtgtttaacaatcgcacggttagccagtaaatcttcgcggtaaccggtgacgttatttaaatatcccatttatgactccttatttctgccaggcaagttgataaagcatgagtgccaacgttttgaccccttcggcaaggtcggtaatattggtgcgttccgccgggttatggctgatcccgttgatgctggggataaaaatcatgcaggttggtacgcgaggcgcgaaaatttgcgcgtcgtgcccggcaccactgtgcatcacccggtaattcagtttttctctttcacacaattctgtcagggtggcgaccagctccttattcatcggcacgggttcttcgtccatccataaatcgatatcaataccaatgtccatttcatcgcaaatcgcccgcatgtcgttttctaactgttgggtgaaatcgcgcagcacggcagcgtcggtatgacgacaatcaatggtgaacgtggttttacccggcaccacatttaccgtattcgggcgcggctctactttgccaaaggtcagaaccagcggatcgcccatccttttcgctttttcgacgctctgatggcaaatgcgactgaaagcgtaaactgtatcacgacgataacccatcggcgtggtgcctgcatggttactttcgccgttcagcgttaccgtataacgacgctgcccgacaattgcattcaccacgccaatactttgcccattactttccagcacacagccctgttcaatatgcagttcaacaaaggctttaatatcctgacgcggagttagtggggcgttcggaagagtaaatccgcaagccttcatcgcatcgacaaaactatttcctttggcatcacagatattccgcacgtcgtcaggattcgccagcccaaaaatatttttactgccccagaagacatacgggaagcggctgccttcttcttctgccatcgccaccacttcgaccgtacgtagcggcgcgccgtattgcgttttcagccagtcaattgccagccacgccgccagcgcgccgaattgcccgtcaaggttaccgccgttaaccacggtatcgatatggctaccgctcagaaccacttcctgtggatattcggtgccattcaggcgaccgtataaattccccacttcatcgaaacgtgtttccagcccgcttgctgccattctttttttaaattgctgctgggtttccagccattccgggctataaagtaaacgggtcatcccacccgctgggtcagcgccaaaagaggaaagccagggcagcgtttcttctatagcttgacggaaatgtgtaatcataagaaagtcctgtctcaataattattgcgcaaagggatttttcgtttcgtaactcgtgttataaagcgcgtcggaaattaaatactggtaaatatcatcaacaatttcgatgccttcgacggcggctttgcgttgtttaatatcctgatcctgtccgggataataaacctgattaaaaccgggcgcgggggtaatggcatttaattcgcgcatggtctggctaagatgttgacggaataattcgctggaggagaaaaagttcggattaataactatatgtaattgccccaaattacgccctgcgtgtaaatcgtcatacatgctactaacctgtcgcccgaacggtaagccgagtaagacgccactgaggacgtcaatcatcatcatcaggccatacccttttggcccggcggcggggagcagagcatgtaccgcgaacggatcggttgttggtacaccgtttttatcgaccgcccaggtatccgggatagacatattacggctgcgggcgtcgagcacttttccccatgcctgtacggtagtcgccatatcaaaggtaaggatctcgtcgccttctcccggcgcggcaaaggccagggggttagtaccgtagtaaatttccgcgccgccaaacggcaccaccattggatcggactggcacatgctaatgccaatgaatccggcgcgggctgcctgctgcacaaaataagagattgcgccgctgtgacccatccggctgataccgaccaccgcaacgccattttgctgggcggttttgatggcatgttccatacccattttcgccgcgacctgtccggcggcattgtcggcatgtaaaattgcgctgcacggcccggtttcctcaagacgaaactccggttcgcggttggtgccgcctttactaatgcgttccgcgtagtattccacgcgcaccgcgccatgagagtggatccctctggcatcggcgtaaaccaatacttcagccacggttgcagcgtgctcacgttttaacccagcctggcagagtttattctcaattagctggtggagtgtttcccgactgattttcatctgtcttcctttttaacgacggtgtgaagcatgactgcaattaacatacagggaaaatatctggattatgtgatccagacaggcaaaaaaatatagttagaatttatttgataatccgctcacttttaacctgatttttaaaacaacaacgcttattaaaaaataatgagtaatagcctggtggttatttgaattcttttgttaataattcctgtgtgatattcatcaccttatttactcgttgtcatcgataccgtaatcgccacattaacactgctcgtgcaattgccatgggtgcaatttttaaggagttgttatgatccacgcctttattaaaaaagggtgttttcaggatagcgtcagtttaatgattattagtcgaaaactcagcgaaagtgaaaatgttgatgatgtttccgtaatgatgggtacgcccgccaataaagcgttattagataccacaggtttctggcatgacgattttaataacgccacgccgaacgatatttgcgtggcaattcgtagcgaagcggcggatgcggggatcgcgcaggcgattatgcagcagcttgaagaggcgctaaaacaactggcgcaggggagtggcagcagccaggcgttgacgcaggtgcgtcgctgggacagtgcctgtcagaaattacccgatgccaatctggcgctgattagtgtggctggcgagtatgcggcggagctggcaaaccaggcgctggatcgcaacctcaacgtgatgatgttctccgataacgtcacgctggaagatgaaatccaacttaaaacccgcgcgcgggaaaaaggcttgctggtgatggggccggactgcggtacgagcatgattgccggcacaccgctggcttttgctaacgtgatgccggaaggcaatattggcgtcattggcgcttccggtaccgggattcaggagctgtgtagccagattgcgctggcaggggagggaattactcacgcgattggccttggcgggcgcgacctcagccgtgaagtgggcggcatcagtgcgctaacagcgctggaaatgctcagtgcagacgagaaaagcgaagtgctggcatttgttagtaaaccacctgccgaagctgtgcgtctgaaaattgttaatgccatgaaagcaaccggcaaaccgacggtggcgctgtttttaggttataccccggcggtggcccgcgacgagaatgtctggtttgcctccagcctggatgaggccgcacgcctggcttgcctgcttagtcgcgtcacggcgcgacgtaacgcaatagcgcctgtcagcagcggatttatttgcggtttgtataccggcggtacgctggctgccgaagcggcgggattacttgccggacaccttggcgtggaagccgacgatacccatcaacatggcatgatgctggacgccgatagccaccagattattgacctcggcgatgatttctacaccgtcgggcgtccccatccgatgatcgacccaaccttacgcaaccagttaattgccgatctcggcgctaaaccgcaagtgcgcgtgttgctgcttgatgtcgtgattggcttcggtgcgaccgccgatcctgccgccagcctggtgagcgcctggcaaaaagcctgtgccgcgcgtttagataatcaaccactgtatgccattgccacggtgacaggcactgaacgtgacccgcaatgccgcagccagcaaatcgccacgctggaagatgcggggattgcggtcgtgagtagcctaccggaagccaccttgctggcggcagcgttaattcatccgctcagccctgccgcacagcaacacacaccgagtttactggaaaacgtcgccgtgattaacatcggattacgcagctttgcgctggagctacaaagcgccagcaaaccggttgtgcattaccaatggagcccagtcgccggtggcaataaaaaactggctcgtttattagaacgtttgcaataaggggttcccatgtttacatcagtggcgcaagccaatgctgcggttatcgaacaaattcgtcgcgctcgtccacactggctggatgtgcaaccggcttcttcacttatcagcgaactaaacgagggcaaaacactgcttcacgccgggccgccaatgcgctggcaggagatgaccggacccatgaaaggggcgtgcgtgggcgcatgtctgttcgaaggttgggcgaaagatgaagcgcaggcgctggcaatactggagcagggggaagtgaacttcattccttgtcaccatgtgaatgccgtcgggccaatgggcggtattacttctgccagtatgccgatgctggtggttgagaacgtgaccgacggcaaccgggcgtactgcaacctcaacgaaggtatcggcaaagtgatgcgttttggcgcttacggcgaagatgtcctgactcgccatcgctggatgcgcgatgtgttaatgccagtattaagcgcggcgctggggcgcatggagcgcggtatcgatctcacggcgatgatggcgcagggcattacgatgggcgatgagttccatcaacgcaatattgcttcctctgcactgttaatgcgtgcgctggccccacaaattgctcgcctcgatcatgataaacagcacatcgccgaagtgatggatttcctcagcgtgaccgatcagttcttcctcaacctcgcgatggcttactgcaaggcggcgatggatgctggcgcgatgatccgcgcaggcagcatcgtcacggcaatgacccgcaacggcaatatgttcgggattcgggtaagcgggctgggcgaacgctggtttactgcgcctgtaaacactccgcaaggtctgtttttcaccggcttctcgcaggagcaggcgaacccggatatgggcgatagcgcgattaccgaaacctttggtatcggaggtgcggcaatgatcgcagcgcctggcgtaacgcgctttgtcggtgcgggtggcatggaagcggcaagagcggtatctgaagagatggcggaaatttaccttgaacgcaatatgcagttgcagatcccaagctgggattttcagggcgcgtgcctggggctggacattcgtcgcgtggtagaaaccggcattacgccactcatcaataccggtatcgcccataaagaggcggggatcgggcagattggcgcaggcaccgtgcgggcaccgctggcgtgctttgaacaggcgctggaagcactggctgaaagcatgggtattggttgaggaacgcgcaatgacgatcatccatcctctgcttgccagtagtagcgcaccgaattatcgccagtcctggcggttagcgggagtgtggcggcgggcgattaacctgatgacggaaagcggcgaactgttaacgttgcatcgtcagggtagtggtttcggccccggaggatgggtgcttcgccgtgcgcaattcgatgcgttatgcggtggattatgcggcaatgaacgaccacaggttgtggctcaagggattcgcctcgggcgtttcacggttaaacagccacagcgttattgtttgctgcgtattacgccgcctgcgcatcctcaaccacttgcagctgcatggatgcaacgcgcggaggaaaccgggcttttcgggccactggcgttggcggcaagcgatccgctgcctgctgagttacgccagtttcgtcactgttttcaggccgcgctcaatggcgttaagaccgactggcggcactggctgggtaaaggccccggattaacgccgagtcatgatgacacgctgagcggaatgctgctggcggcctggtattatggcgctttagatgcgcgctccggtcgtccgttttttgcctgttccgacaatctgcaactcgttaccacagcggtgagcgtcagttatttacgttatgccgcgcaaggatatttcgccagcccactcctgcactttgttcatgctctgagttgcccgaaacgtaccgctgttgcgattgatagcctgctggcgctggggcatacgagtggggcagatacgctgctggggttctggcttggccaacaattattacaaggaaaaccatgaaaacactggttgtggctcttgggggcaacgccttactccagcgcggtgaggcgctgacggcagaaaatcaatatcgcaatatcgccagtgctgtacccgcgctggcacgcctggcccgttcttatcggttggcgattgttcacggcaacgggccgcaggtggggctgctggcattgcagaatctggcgtggaaagaggtagaaccgtatccgctggatgtgctggttgcggaaagccaggggatgattggctatatgctggcgcagagtttgagcgcacagccgcagatgccgcccgtgacgacggtgctgacgcgcattgaggttagccctgatgatccggcgtttttgcagccagagaaatttattggtccggtttatcagccagaagaacaagaggcactggaagcggcttacggctggcagatgaaacgtgatggtaaatatttgcgccgggtggtggcgtctccgcaaccgcgtaaaattctcgacagcgaagccatcgagttgttgctcaaagaggggcatgtggtgatttgcagtggcggcggcggtgtgcctgtgacggatgacggagcagggagtgaagcagtgattgataaagatctcgccgctgcgttgctcgccgagcagattaatgcagatggactggtgatcctcaccgatgctgatgcggtatatgaaaactggggaacgccgcagcaacgtgccattcgccatgccacaccggatgagttagcgccatttgccaaagccgatggtagcatggggccgaatgtaacggcggtgagtggttatgtcagaagccgtggtaaacccgcgtggattggggcgttaagccgaattgaagagacgctggcgggcgaagcggggacctgtattagcctgtaatcgtaggcattagacatttgtgcctgatgcgacgcttgacgcgtcttatcaggcctacaaccggtgccgcatccggcaattggtgcacaatgcctgatgcgatgcttgacgcatcttatcaggcctacaatgggtaccggatcggtaggccggataaggcgtttacgccgcatccggcaagaatagagcaccagttaaccgaacttactctgcgcccaaatcacgccgctggcatattccggcggcagcagcgggattaaggcttccagcgtcgcagtcagacggcttgtgtcgctgtcggtcaaattcagatgccccactttacgccccggacggacttctttgtcgtaccagtgcagatgcaccagcggcagtttcagccagtcataattcacatcgctaccaatcagattgatcatcacgctcggattattcaccactggttgcggtaacggcagatcggtaatcgcccgcagatgcagctcaaactggctgatgctggcaccgttttgtgtccagtgaccgctgttatgcacacgcggtgccagttcgttgatcaacagaccttgcggggtgacaaaacactccatcgccatcacgcccacatagcccagctcctgcataatcgcgctcagcatctcttcggcttgcgcctgctgctgtgcgttggcctgcggaaaagcgacgctggtgcgcaaaataccgtcctgatgcaggttatgcgtcagcggataaaacacggtgctgccatcaaagccgcgcgcgccaaccaggctcacttcaccagagaagttaatgccctgctcgacaatacattcgccgtaacactctgccggtaactgttcggtttcatttgcgcgtaaacgccattgaccgcgaccgtcataaccaccagtgcgacgcttaacaatcgccagctcacctaaacgatcaaacaccgcaggccactcgctgcgttcggcaagtaactgccacggtgcagtcggcaggtggagcttatcgaaaagctgcttctgagtcagacggtcagcaataatcgggaacacatcgcggttcacaaaggccggatggcgcgccagctcgcgggttaatgcggtttccggccagcgttctatctcagcggtaatcacgctttgttgaaaaggcaccgccgccggttcagcgtccagcccgactggccagacagcaatgcctaacggttcgcctgcctgacgcagcatacggcctaactgcccgttaccgaggacgcaaacctgtttcatgccgcacctcgcgggtccgggttttccagcacttcgtcggtctgggctttgcgccagtcattcagacgctggtgcagttctttatcatgagtcgcaagaatttgtgctgccagtaacgccgcgtttgccgcgccagctttaccaatcgccagcgtacccaccggaatgccgcgcggcatttgtacgatggagtagaggctatcgacaccgctcagtgcggcgctctgtactggcacgcccagcaccggcaccagcgttttggcggcaatcatgcctggcagatgcgctgcgccgcctgcgcccgcaataatcacctgataaccgttctcttcggcgctttcggcgaagctgaacagtttatcgggggtgcggtgagcagaaaccacttcaacgtggtgcgggacattcaggatttcgaagatttcggcggcgaactgcatggtagcccagtcgcttttggaccccatcacgatggcgacacgcgccggattattgcgggaagacatgcgtcttaaaactcctgtggtgcacaactctcggctttagagggcacagagaatagcacggaaagagagcaaggaaaacggttgcgtggctgtgaaatcagcaaagttgcgggttttttaaaacggaaaatgaatcagctcaacgtcatccgccgtgactttcaccatactaccttccgtatgccaggcacccagtaccacgcgaaaagcaggttgctgattggcgataagttcatgcaccgccgggcgatgggtatgcccgtggatcagccattgcacctgatgtttttccatcgcactgaccaccgcgttttggttaacgtccatgatcgccaggcttttactgctgttggcttctttgctgttcgcgcgcattcgcgcggcaatgcgtttgcgcacaaacaacggcagggcgaggaatagcgtctgcagccagggtttgtggaccttggcgcgaaaagcctgataacccgcgtcatcggtgcacagcgtgtcgccatgcataatcaacacccggcgaccataaagttcgagcaccttttcttccggcaataacgtcatgccactttcacgggcaaagcgtttgccgagcagaaaatcacggttgccatgaatgaaataacagggaacgccggaatcggacaccgctttgatcgccgccgccatcttgcgatggagtgggttgggatcgtcgtcgccaatccatgcttcaaacagatcgccaagaatatacagcgcgtcggccttgcgggcttcccccgctaaaaaacgcagaaaaccggcggtgatcgccggttcttccacgcagagatgaagatctgcaataaagagtgtcgccacgattactcgctaacggtcacgctttcaatgataacgtcttcttttggcacgtcctggtgcataccgctacgaccggttgcaacacctttgattttgtctaccacgtccatgccgtcaaccacttcagcaaacacgcagtagccccaaccttgcaggctttcgccagagaagttcaggaagtcgttatcaaccacgttgatgaagaactgtgcagttgcagagtgcggagcctgagtacgtgccattgccagcgtaccacgggtatttttcaggccgttgttggcttcgtttttgatcggttctttggtggctttttgtttcatgcccggttcaaaaccgccgccctgaatcataaagccgttgataacacggtggaaaatggtgttgttgtaaaaaccttcgcggcagtagtccaggaagtttttaactgtttcaggtgctttatcgtcaaaagttttgatgacaatatcgccgtgattggtgtggaaagtaaccatttttgcatcctgttccgtttgattggtgcttcaacccagttcgggtcatatatagggtggtgttatagcataaccgcacgatcggatcatcacgcaatgtatgctgattcgcgcgggaaatatgggtattatacgcaactcaattacccacacatgtctaaacggaatcttcgatgctaaaaatcttcaatactctgacacgccaaaaagaggaatttaagcctattcacgccggggaagtcggcatgtacgtgtgtggaatcaccgtttacgatctctgtcatatcggtcacgggcgtacctttgttgcttttgacgtggttgcgcgctatctgcgtttcctcggctataaactgaagtatgtgcgcaacattaccgatatcgacgacaaaatcatcaaacgcgccaatgaaaatggcgaaagctttgtggcgatggtggatcgcatgatcgccgaaatgcacaaagattttgatgctttgaacattctgcgcccggatatggagccgcgcgcgacgcaccatatcgcagaaattattgaactcactgaacaactgatcgccaaaggtcacgcttatgtggcggacaacggcgacgtgatgttcgacgtcccgaccgatccaacttatggcgtgctgagccgtcaggatctcgaccagctgcaggcaggcgcgcgcgttgacgtggtcgacgacaaacgcaacccaatggacttcgttctgtggaagatgagcaaagagggcgaaccgagctggccgtctccgtggggcgcgggtcgtcctggctggcacattgaatgtagcgcaatgaactgcaagcagctgggtaaccactttgatatccacggcggcggtagtgacctgatgttcccgcaccacgaaaacgaaatcgcgcagtccacctgtgcccatgatggtcagtatgtgaactactggatgcacagcgggatggtgatggttgaccgcgagaagatgtccaaaagcctgggtaacttctttaccgtgcgcgatgtgctgaaatactacgacgcggaaaccgtgcgttacttcctgatgagcggccactatcgcagccagttgaactacagcgaagagaacctgaagcaggcgcgtgcggcgctggagcgtctctacactgcgctgcgcggcacagataaaaccgttgcgcctgccggtggcgaagcgtttgaagcgcgctttattgaagcgatggacgacgatttcaacaccccggaagcctattccgtactgtttgatatggcgcgtgaagtaaaccgtctgaaagcagaagatatggcagcggcgaatgcaatggcatctcacctgcgtaaactttccgctgtattgggcctgctggagcaagaaccggaagcgttcctgcaaagcggcgcgcaggcagacgacagcgaagtggctgagattgaagcgttaattcaacagcgtctggatgcccgtaaagcgaaagactgggcggcggcggatgcggcgcgtgatcgtcttaacgagatggggatcgtgctggaagatggcccgcaagggaccacctggcgtcgtaagtaattgcgctattgccggatgcgagttttcgcatccggttatcgtctgcgccaccacaacattcccatcagtagcatccccggcaaccacacccacatcaattcagaaataatcacctgatgcccgtacggcgtggtgtaacgagacaatgcaaacggcgcgacttttatcacctgccagggagcgaaaaagcgttcatcactccacggccacagccagccaacgcctttaccgccagtggttacgctatccagcaagctgtggcttagcaagctgacggttaaaaacagccagcagcgaatcagcccagccctgaaccatcggcgtccaataaacacacataacagcgggacaacaaacgcaaacaccaggctatgggtaaacccgcgatgaccaaaaacattgccgtaagcaacgccaaatttaaagctcaatacgtcggcgtcgggcagcatcgccaggatgattccggcaaataacagacgcggagggatgactttgctacccaaccctaaaccaatgcataggggaacggcggcgtgcgtaataacggttggcatgatggtcgcttcggcaaaatgtcgatgctatcagcatggatgaacggggcgtagagggcaaaagtctgaaaagagaaccggcctgttgatacaggccgggaaagggatcaggcaacaacctgtacgctgtgacctgcaaaactcactgtctgaccggcgacgattttgcagcgtttgcgcgtttcaaccgcaccgtcgactttcacctggccttcggcaatcgcgattttcgcctgcgcgccgctttcgctccagccttccagtttcagcaagtcgcacagctcaacgtgcggatgtttacctaaagaaaatgtcgccatgttactcatcctgtggatcatgatattcaacgcacgcctgtagcgtgttttcaatcagcgtggcaaccgtcatcgggccaacgccgccgggaacaggcgtaatgtaactggcgcgtttagccgcgtcttcaaacacgacgtcgcccacaactttgccattttccagacggttgatgccgacatcaatcacaattgcgccttctttgatccagtcaccgggaataaagcctggcttgccaacggcaacgatcaatagatcggcattttctacgtgatgacgcagatttttagtgaagcggtgagtcactgtagtggtgcaacctgccagcagcagttccatgctcatcgggcggccaacgatattgcttgcgccaatcaccacggcgttgaggccgaaggtatcaatgttgtaacgctcaagcagcgtgacgataccgcgcggggtgcagggacgcagacgcggcgcgcgctggcacagacgaccgacgttgtaaggatggaaaccgtccacgtctttgtccggatgaatacgttccagcactttgacgttatcaatacccgccggtaacggcagttgaaccagaatgccatcgatggtgttgtcggcattcagcgtatcgataagctccagcagctccgcttcgctggtggtttccgggaggtcataagagcgggagacgaacccgacttcttcacaagccttgcgtttgcttgcgacataaatttggcttgcagggttactacccaccagcacaacggccagtcctggtgcccgcagtccggctgcaatacgcgcctgaactttttgagcaacttcagagcgcacctgctgcgcaatcgttttaccgtcaataatctttgctgccatcagagagaggattccatctgttacgtagatcgaaggggatgcgcctattttgtcagaagcggggcgcgctgtcaggtttcgtttcagatttatcgcgtgaagcgacctcttgcgaaggtgaggcgcaccgtcgctgagactgaaagcttcatttttcgtccatgatggcgttgtaaatctggaactgatttatttccttgtctaaggattaagataatttaagaaatacctgacaatataaaaagaattttcagcctggtaatttaccgcttcaggtctatatttgtgttgaatatattttgcgcggaagtattcatctaacggggctctctattttttagaatagagtgcatattttcaattaagacattcttagaggataaaaaggaatttactactatcagtgtcttaaataaagtaatcggttatatacggatgtggagtcgataaatgagattgaaggaatatatatgaaattaagatttattagctctgcgctggctgccgcactattcgccgctacgggtagttatgctgccgttgtagatggcggtacaattcactttgaaggcgaactggtgaatgctgcctgtagtgtgaatactgacagcgcagaccaggttgtcacactcggtcaatatcgtaccgatattttcaatgctgttggtaatacctctgcattaattccattcaccattcagttgaacgactgcgatcctgttgttgccgctaatgctgccgttgcattttctggtcaggctgatgcaatcaatgataatttattggccattgcatccagtaccaatacaacaacagcaacgggtgtcggtattgaaatacttgataatacatccgcaattctcaaacctgatgggaatagcttcagtaccaaccagaacttgatccccgggaccaacgttcttcatttttctgcacgttataaaggcaccggtacaagtgcaagtgcagggcaagcaaatgctgacgcgacttttattatgagatatgaataatcaaaaccacgttgttttgaattatatatcacgtcttataacaaagtaatgtaccggttgtctgaagcggtatggtggcaatgtaaatcgaaatcatgttcactttgtatcatgccgctttattaaatgaaaagggaatgatgtgttgtaagaaaccaaagcaatcatttctttatattccttatttttgccgtcaggaatacacaaggcgtattaactatgatgactaaaataaagttattgatgctcattatattttatttaatcattagcgccagcgcccatgctgccggagggatcgcattaggtgccacgcgtattatttatcccgctgatgctaaacagactgcggtatggattagaaatagccataccaatgagcgctttctggtcaatagctggattgaaaacagcagcggtgtaaaagaaaagagtttcatcattacaccgccactgtttgttagtgaacccaaaagcgaaaatactttgcgtattatttacaccggtccaccgctggcagcagatcgtgagtctctgttctggatgaatgttaagacgatccctagcgtagataaaaatgcattgaacggcaggaatgttttgcaactggcgattttaagccgcatgaaattatttctccgtccaattcaattacaagaattacccgcagaagcgccggacacactcaagtttagccgatccggtaactatatcaatgttcataatccaagtcctttttatgtcaccctggttaacttacaagtgggcagccaaaagttggggaatgctatggctgcacccagagttaatagtcaaattcccttacccagtggagtgcagggaaagctgaaatttcagaccgttaatgattatggtagtgtaactccggtcagagaagtgaacttaaactaaccgaatcatctgacaatatcagagctaattatgaaaatacccactactacggatattccgcagaggtatacctggtgtctggccggaatttgttatagttctcttgccattttaccctcctttttaagctatgcggaaagttatttcaacccggcatttttattagagaatggcacatccgttgctgatttaagccgctttgagagaggtaatcatcaacctgcgggcgtgtatcgggtggatctctggcgtaatgatgagttcattggtagccaggatatcgtatttgaaagcacaacagaaaatacaggtgataaaagtggtgggttaatgccctgttttaaccaggtacttcttgaacgaattggccttaatagcagtgcatttcccgagttagcccagcagcaaaacaataaatgcatcaatttactgaaagctgtacctgatgccacaattaactttgattttgcagcgatgcgcctgaacatcactattcctcagatagcgttgttgagtagcgctcacggttacattccgcctgaagagtgggatgaaggtattcctgctttactcctgaattataatttcaccggtaacagaggtaatggtaacgatagctatttttttagtgagctcagcgggattaatattggcccgtggcgtttacgcaacaatggttcctggaactattttcgcggaaatggatatcatagtgaacagtggaataatattggcacctgggtacagcgcgccattattccgctgaaaagtgaactggtaatgggagacggcaatacaggaagtgatattttcgatggcgttggatttcgtggtgtacggctttattcttctgataatatgtatcctgatagccagcaagggtttgccccaacggtacgtgggattgcccgtacggcggcccagctaacgattcggcaaaatggttttattatctatcaaagctatgtttcccccggcgcttttgaaattacagatttgcacccgacatctagtaatggcgatctggacgtcaccatcgacgagcgcgatggcaatcagcagaattacacaattccgtatagtacagtgccaattttacaacgcgaagggcgtttcaaatttgacctgacggcgggcgattttcgtagcggtaatagtcagcaaagtagccctttcttttttcagggtacggcactcggcggtttaccacaggaatttactgcctacggcgggacgcaattatctgccaattacaccgcctttttattagggctggggcgcaatctcgggaactggggcgcagtgagcctggatgtaacgcatgcgcgcagtcagttagccgacgccagtcgtcatgagggggattctattcgcttcctctatgcgaaaagcatgaacaccttcggcaccaattttcagttaatgggttaccgctatagcacacaaggtttttatacccttgatgatgttgcgtatcgtcgaatggaggggtacgaatatgattacgacggtgagcatcgcgatgaaccgataatcgtgaattaccacaatttacgctttagccgtaaagaccgtttgcagttaaatgttagtcaaagtcttaatgactttggcagcctttatatttctggtacccatcaaaaatactggaatactagcgatagtgatacgtggtatcaggtggggtataccagcagctgggttggcatcagttatagcctcagttttagctggaatgaatctgtagggatccccgataacgaacgtattgtcggacttaatgttagtgtgcctttcaatgttttgaccaaacgtcgctacacccgggaaaatgcgctcgaccgcgcttatgcctcctttaacgccaaccgtaacagcaacgggcaaaatagctggctggcaggtgtaggtgggaccttactggaaggccacaacctgagttatcacgtaagccagggtgataccagcaataatgggtacacgggcagcgccacggcaaactggcaggccgcttacggtacgctggggggcgggtataactacgaccgcgatcaacatgacgttaactggcagctgtctggcggtgtggtcgggcatgaaaatggcataacgctgagccagcctttaggggataccaatgttttgattaaagcgcctggcgcaggcggtgtacgcattgaaaatcaaactggcattttaaccgactggcgcggctatgcggtgatgctgtatgccacggtttatcggtataaccgtatcgcgcttgataccaatacgatggggaattccatcgatgttgaaaaaaatattagcagcgttgtgccgacgcaaggcgcgttggttcgtgccaattttgatacccgcataggcgtgcgggcgctcattaccgttacccagggcggaaaaccggtgccgtttggaagtctggtacgggaaaacagtaccggaataaccagtatggtgggtgatgacgggcaagtttatttaagtggtgcgccattgtctggtgaattactggttcagtggggagacggcgcgaacagtcgctgcattgcgcactatgtattgccgaagcaaagcttacagcaagccgtcactgttattagcgcagtttgcacacatcctggcagttaaaggaaattatcaataagataatctgcagattattattggcgatggcatgtttgtgtctggcaaacatatcctgggctactgtttgtgcaaatagtactggcgtagcagaagatgaacactatgatctcagtaatatctttaatagcaccaataaccagccagggcagattgttgttttaccggaaaaatccggctgggtaggtgtcagtgcaatttgtccacccggtacgctggtgaattatacataccgtagttatgtcaccaactttattgttcaggaaactatcgataattataaatatatgcaattacatgattatctattaggtgcgatgagtctggttgatagtgtgatggatattcagttccccccgcaaaattatattcggatgggaacagatcctaacgttagccaaaaccttccattcggggtgatggattctcgtttaatatttcgtttaaaggttattcgtccctttattaacatggtggagatccccagacaggtgatgtttaccgtgtatgtgacaagtacgccttacgatccgttggttacacctgtttataccattagttttggtggccgggttgaagtaccgcaaaactgcgaattaaatgccgggcagattgttgaatttgattttggtgatatcggcgcaagcttatttagtgcggcagggccgggtaatcgacctgctggtgtcatgccgcaaaccaagagcattgcggtcaaatgtacgaatgttgctgcgcaggcttatttaacaatgcgtctggaagccagtgccgtttctggtcaggcgatggtgagcgacaatcaggatttaggttttattgtcgccgatcagaacgatacgccgatcacgcctaacgatctcaatagcgttattcctttccgtctggatgcagctgcggcagccaatgtcacacttcgcgcctggcctatcagtattaccggtcaaaaaccgaccgaagggccgtttagcgcgctggggtatttacgcgtcgattatcaatgaggtacggagaatgagaagagtactctttagctgtttctgcgggctactgtggagttccagtggatgggcagttgaccctttaggaacgattaatatcaatttgcacggtaacgttgttgatttctcctgtaccgtaaacacagcggatattgataagacggtagatttaggcagatggcctacgatacaactactgaacgctggcgataccacggcactcgtcccttttagcctgcggctggagggatgtcctccgggtagtgttgcgattttatttacgggaacgccggcatccgataccaacctgctggctctggatgatcccgcaatggcacaaaccgtcgccatcgaattacgtaatagcgatcgctcccggctcgcactgggggaggcgagcccgactgaggaagtagatgcaaatggcaatgtcacactaaacttttttgccaattatcgagcgttagccagcggtgttcggccaggtgtggcgaaagcggatgcgatatttatgatcaattataattaatattatattaattcgtataatttggcgtagtcgataagctctacaatactatgcaaacctagcttgccataaatattagatttatgcgcactaactgttttattgctaagtaataacttatcggcaatttctttattagataatccgctaaccagataacgtaatatggtcacttcacgattagatagcacagtgaccgtactactattcgtactacatttattgctttttatatagttaagcgtttcgctgggaaaaaacgtgtatccggagaggatcatctgaacggcatgaaaaatatcattctgatcattgcatttactgacaaaaccgttagcaccagcttgtatcgctctgccagcataaaagcattcacttttgctacttaaaaataacactttcactgtgctctggatttgtttgatccttttcaggaaggtaaaaccgtctgttccgggcaagtctatatccataatgattaaatcaacaggacgggttcggagataatcgatggttatgcgataatcatccgttttcaggacaatctgcaattcactgtttttttgcaacagaacttcaatagacattctgatgataggatgagtatccataatgatcacgctcgttggtttcatagttaccagtctcataggagcggacaattttccgttaggtcgggaaattgtactttgatacatgaaaatacgggttttcttgattcagacgcgcagcggtgtgcgtttgtttgccgctatagcgaaataaatcagaaaatcagacgcggtcgttcacttgttcagcaaccagatcaaaagccattgactcagcaagggttgaccgtataattcacgcgattacaccgcattgcggtatcaacgcgcccttagctcagttggatagagcaacgaccttctaagtcgtgggccgcaggttcgaatcctgcagggcgcgccattacaattcaatcagttacgccttctttatatcctccataatttcagagtgggacatatttgggacattatcaccaaaaatgtcgtctattttcctcgcatgctctgtcaaatgattaggcgcaaggtgagcatacctacgaaccatttctatggactcccatccgcccatttcctgaagcactgataatgggacgcctgactgaatcagccagcttgcccaggtgtgtctgaggtcatggaaacggaaatcttcctcatttatgcccgtcttatccgtttccgctttgcccttcaccacatcactttttgtcgctgtttggcgagataattcaacggtgtcaggccgtaaaacgccttaaaaacagagataaagtagctcgtgctgctatagccacataattgcgccacctgagtgatatttttgttatccatcaataacatctgtacggcgtaacgcatacgacactctgtgacaatctggctatagctggtattttcgttttttaatttctttttgagcaggctggggcttaaacataggctactggcgacaattcgcagattccagtaatgctgaatatcgctttgaataatgcggcagacgctgtcgcggacgctgctgcgtaagatatacatcagtagggcaataaaccggctttgctcaagaaagttagacaatacggtaaaaagcaatgcgcgcgtcaactccgcttcgcagggtctgctgggttgctgcttgctgtggttggcggctagccggaacacttccggtgtacggctatgacaagcgataaccggggttgccagccggctccagggctttacacaggttaagttcttatttaaaaacaacagataatcgttgatgatgttacggttgatgtgggtgattaatacgtgatttaacgtactgagttcaatgacgttattgttgcacgcgaaggcggccaggtagtttttcggaagggtaaacgtagcatggttattgacgcttacctctacctctttttcggtcaggatcaccacgcaaggttcactgctgctcaattgcatttcgcactcctcagatatcagaaactccgctcaaaggatctatgcttcctgcatgagtgatcggcccgttcgccgataacgatcttctttctttagcacgctttttagcaattaatcttgatggaattctgatgagagcgaaagaggtaagccaggtcgtacccgacttacctggaggagatttaatactcgagaatgccgtgcgcgacgggcaaatagcgcagagagaaatagagagtgtctttaccgcaagaggaacgtttcgctaacaggctggcaatttctgcgtccggtttcggtttcgctgtaaaggttttgcctttgccggcgacaaaaagttcataaacaacgccgctggcaggggcgggactttggcaatcggcgctggcctgtaaataacgttcacgctgttcagcggtcagtttatccacgccgctgccatcctgtacccagacattaacgccggttgctttaacgtgttccagcagttggcgatagccatcggggctcatgtttccggcgaaaaaactactgatataaaccggttttgcactaacatcgctaatcagccgctgcgcgttgtttaaccatgttagcaaaggctgacgggcggcttcgctgcgccagttcaggtcgtcaatttccgcgctgatgtaccagccatccggcgttatgccaggcgcggcgctccataatctggcttgctggagatcggcagccagcaggcgattaagatagctttccagcgctgcggagctctgtttctggtgcataaaaaattccggatcggcgttcagcccgacaataagcttcagaccagcctgttgcgcagctgcggcccgcttaaacaataacgtgcgctgttctggctgggtaaatgcatcgccgtaacgggtccattgcaaaacaagggtatcgaagccttgcaaacgtaactgactcatcagcccctgccactgggtatcggtaacctgactatctcggttttgtggttgccagataatacctttcatcgcaaaggaaaaagggctgaccaaaagcagtgtcagcaatacgaaaatgaacttacgcatttaccagtgcactccaatggtgagaaacgcgttgttgcgctctccgttacgttgattaatcgccttaaaggtatgttgatactcgacgccgagactgactttgtgcggccaggcgtcgtagtgcgtctcgccggtccagatattccagcggaccccgactccgccaagctgcgcgccctgagtgcctttatcacgatagccgttgtcctgaacgtgagcgtaaggctcaatagtctgtccgttagctaccttctgatgccagctgacgcgataatctgccgtccacgcctgaatatcctggcggatatattgcgccgcatcgaggtacaggttttgggcaaaccagccactaccgttcgggtgccattcgtcgctgtatttgccgccattaaagaaactggcgctggcgcgcagcatggtatcggatgcgccattttggccgttcagcggcaactgctgttcgacggcgatgaaaaagatctgatcgcgcagcggcttccagcgcagaccggtgccggacatcggatttttcaccggcatcatcaccccgttttctccggtatcggcaaagacgcggctataaacactgagcaggtcgccttccagcagcatattgcgtccgatgcggtactcggcttccagttgtccgtagctacgatagcttttccctggcgctgcgccgccgacattattgttagcggtactcattgcgccggaacgcaagccgatggaagaatcgaaactgaacgtccagcggcgaccgacctcctcatgcaaacggcggaaattgaagcgttgttgattttgttctggggtcagtggggttatcagcgcctgattatcaatgtcatcaatcaccagccgggcgtagtgctgcgtcgcaggcatgtcatccagacgctggttcacgtaggccagttgtcggatcagtgccggatcgtccggaagccctttatgcgccggttcgagcatttcccggctctgtgcgatatcaccgctatcccacaaggcgtaaccaagcgctgcctgggtgttgctattattcggttccagttccagcgcggcgcgcaaatcactcaccgcggccgggacattatgacgttggcgataaattgtcgcccgcgcaacgtaagcgttggcagaaggcgcaatattgatactgcgcgtgagatcgttcagtgcgagttccggctgaccaggaatgtaacgttgcgcatgcagccaccagtagagggcattgcttcccagtccacgtttttctgcctgttgtagccagcgatcgcgagccgcaccatttcctgccgcctgggcggtattggcagcagcaagcagatcctcattgctcatgtcgtgaagactgattttctgccaggccgccagtgcggtggcgtagtcctcaacctgatacgcctgataggctaccgcacgatgttgccaggcgctcggttgtcgttgttcggcctgaagccatgcatacaacgccacaccgggtagcgtgtcccgataacactttgccagacggttccaggcggcggcatcgtaggaagggctcatatcgcccagcaagcgaactattgccgggcaattatctgcaatacccggcaactgactttgccactgacgttgctccgccagcggtaagggtttgcttaaaatcgccaccttcgccggcgttgccaggtaaggatgactttccagcagagacgccagtcgcgccattaaagtctggctgacacgcgcatcgccctggaaaggatagcgttgcagcaataaatcggcagcttcgcgactctgctcgttctgcatcagttgccaggttagttgatccaggcgggtaagatttgccggttcttgctgatacagcaatcgtgccagacgcagagcttcagccttgttacgggtcgccacgctgacagcataacgctcctcaagcatttcattggcggggagggtggcgagcagtttttgcgctgcgtcgtactgaccttcttttaacagcaccggtagcgtcgcgccaacaacatactggcggttgtcggcaaactgtaccgtataattcgccaacgcctgaacggggttagcgctgtatttagataacagatagagccaacttttctcttgtgcgtccgtggtaaatagtggcttattttcaatgagataatgctggaggcgtgctttttcgccacgataagccagcgcggtcgcgtaagtaatataactctgaggatcggtgaagatcccctgactttgcagtgccaggatccgatcgtccagctgcccggcaagaagcacgtcaaaccactgacggcgttctgccgcgcttaatgtgttctgctggcgtgcttcattgtatagcgtatctgcctgggaccattgtttcaggtagattgcccgttgcagcagatcggttcgcagcgtttttccttccgggcttgcagcaaacgtcgcatcgttcagttgcgctctggcgacaggtaactgtgccagccgcagggcattctgcccgacttcactgcgacaacgcagggtcggcgcagcatcgcacgctttttgctgggcaagcagttcttcaactgtcgtaacgcttttcacttcaaccggaatagccgccagactgcgctcaagtcgggcatctcctgggtgacgtttcagttgatcctcaagcaacagccgcgcccggtcatcatgaccaaaatggcgataggcttccgcaaggtataaagtcagcggaatattatccggcacctgctggtgtatatattcaaattcgcggatggcggttgcttcgtcgttatttttctgtgccttcagcgctttatcgagacggggataaataacaaaatggcgataatcgctcagccccagctcttctgcgctggtgccgatattgtctgcgagtgcgctggtactcaataaagacgtcagcagtaaaccagaccatccgatgacgcgattaaggttattctccttcattttcggactccagttgcgcaacctgttctgtgtttaaacctgctttgagtaatagactttgcatgctaacttgtaattcgcgttgaattgtcaggacgcgatccaacgtttcctggctgataacgccttcggtgaccaaaaacttgccgagcggcagagaactgcgttcatggcgcaataacaacacgttaattgcactacgattaatatgaccgagcgtggtcagtatttcggcgaacaggaactgatgcggcacatattgccgccagatttcaccggcctgctgttccgtgagccactgatgctgaaccgcattgtacaacattgcccgcggatcgtgaccgcgtcggcgtgcataccagtgacgtaaccctgtgacaatttgtccccgcagaacaatgacgtaacgcactttgcgtccgactttacgcgtcagggccgccaggctaaccgggtcaataccatcttcactgccgacaattaactcgtcattttccagacgcagcggcagtaccgcataatgcagcgccacggaggccggcatttcggcaatcaggctggaagggatctgccaggcatcgatggattcccacgccacgccgttttgctctgccagcgcctgtgccagctgctcggcgctaatcagcccctgcatcagcatactaccgcccaggcgtagaccttcgacgcgattacgcagtgctgtatcgagttgttcttcagtgatgacctgattttccagcagaatttgacctaacgggcgcaagctgcgggtatcgccagtcacgctggggaagtcatgcgttgttttatcccacgccacgcgacgtggatcgccgtgttgaagtacctgttttagcgcgcgccagttggccatgaagttaatcaggttgccccagaaaagacgcaggacggaaagcagcccctgcgtcaggccgtagtagccagtaacgaaaatcacccgctgcacgatgcggttaaccatcaaaccaaagtttagccacagcagggtcattaaccatgcgctgccgctgaaaatagaaaggaaatgccaggcatcgggccacaaactttcatacgccagcaacagcaaaagctggatcatcaccagcatcgcgaggaagctgacaaagttactgattgcccctttgcggtcgcgccagagaaagtagttcagcgtcaggctggaggtccatttatgggttttaaagccttggaaaacaatgccgatgatccagcgggatttttgtcgaaccgcagtgctaaaggtatcggggaaatattcgcgcacgcagatcatgttacttgtccgcgcgtgctgtaaaaatttacgctgctcgcgttctttggcttcgtccaccaccggaaaacggacaaaaatttccgtcatacctttttctttcaggcggaagccaatgtcgtaatcttcagtaagactctgcacgtcgaaagcaataccgtcaccgtcagctaacagtgcggtcacggcgcggcggctgaaacaggtgccgacgcctgcgctgggcacttgtccggcgagggcttcacgcaccggaacatctttgccatgcagctcactaaactcatcaatgtaagtcatgctggtgaagtgcgtccattcgcgttcgaacggatacaccgggatctgaatcagatctttacgctcgaccagatagttgaacagacgcaattccatcggactaatcacatcttcggcgtcatgcagaataaaaccagcaaaagcgaaattggcgctacgctcaaattgggtgatggcgtccagcacgttgttcagacagtcggctttgctggtggggccaggacgcgcgcagactaccttatgcacattcgggaagcgagcgcacacttcgtcaacatcacgctgagtatcggggtcgttggggtaggtgccaacaaagatatgatagttttcgtagtcgagcgtggtcgccgccagctcggccatattgccgatgacgcccgtttcattccacgccggaaccataatcgctaacggtttttcatctggtttatacagttcgcggtaactcattcgcgggtagcggcgataaacactcaacttgcgtttaatgcggcgtacccagtagacgacatcaataaaaaaatcgtccagcccgctgatgaacatgatgaccgctaacgttatcgcgattacttttaagccgtagagccaggtagcaaaaacatcaagaagccagtccacacaaaaaccttacattaacgctggttatgtttagggtggcgtatattaaggttttttatgaattgtgacagctttttaccattaataggtatgactattgcggcacgttatttttacactggttataaaagttgccgtttgctgaaggattaagcgggtaatgtgataacaaaccttgtcccccgcgcatcgctcgttaccgcaaccgtgcctttatgcgcgacaacaatgcttttcactatcgccaggccaataccgctaccttcaccttttcgctggcgggaggggtcaacgcgatagaaacggtcaaacaatcgcggtaagtgctcgggcgcaatgggcgtaccggggttttcgacgataacttgcaccaggtgatcgaccgtctgacagcgcactacaattgtctctccggttggcgtataacgcagggcgttgctaagcaggttgcttagcgcccgacgcagcatcagcggatcgcccgcgacctgacacttgtcgccaacaaaccgcaactccacgccgcgatcttccgctaacgcctcgaaaaaatcgaacactttgccgacttcatccgccaggttgagcattttcttttcggggattagctggttgttatcggcctgagcgagaaacagcatatcgctgaccattttcgccattcgcgtcagctcttcgagattagagtagagcacatcttccagctccttctggctgcggctctggctgagggcgatttcggtttgcgttatgagattcgtaattggtgtgcgaatttcgtgagcgatatccgcactgaaattggactggcgggtaaagacatcctcaatacgctcgatcatatggttgaagctcagtaccagctgttccagctcaatgggcacggtctgcgggtcgaggcgaacgtcgagatctttgctggtaatattctggatttgacggctgacgctgcggatcggcgcgtgacctttatgtaccgccaacagtacgataaagacgatcaggatgctgattacgcttgcggtcataataagtttattcatcaaatcatttatgtaatgaagatgaaaatcgatgctaagcgcgatgtagagcgtataaatcggtttgccgtccaccaacgggccaaccggcaagttaatcatccgccagttgctgtgttccatatgcccgtgaccgtggcctggcatcatcatcgtcgggccggaaaggagatacacctcgccaccctgagcgtctttatcgggtatggcgtcacgcgtaaactcgcggatatccggcgcaccgggggagtgatacaccgttttaccctgactatctgccagggaaatcaacacattggaataaccactgacgatatcttccagcgtcattaagcgtcgggcttgcgtttcgtcagggtgatttagtacccgttcaagggtggcgctaatctcttttaaatcattaatatcctgctcggcaaaatgaacttttacactgtggatcatgatccatgcaaaggcgaaaaacgccgcgatggtggccaggctgataaaaaaggtcaggcgggttgccaggctaaacgggcgctgaaatggcttactgaccatccggcacctcaagcatgtaacccacgccgcgcacggtctgaattagcttcggctcaaagtcgttgtcgattttgccgcgcagccgcttcaccgccacatcaatagcattggtatcgctgtcaaaattcatgtcccatacctggctggcgataaggctgcggggcagcacttcgccctgatggcgaaggaagaactccagcagagtaaactctttactggtcaaagtgatgcgcgtgccgctgcgggtgactttgcggctgacgagatcgaccatcaaatcggcaacctgaaactgactttcgataatcaccgccgccccgcgccgcagtaatgtgcgcacccgcgccagcagttcagcaaaagcgaatggcttcaccaggtagtcatctgcccccaactccagccccttgacgcgatgttcaatggtgccaagcgcggtaagcaacagaatcggcatccctttattggcggagcgtaacatgcgcacgatatcccagccgttcacgtccggcagcataatatcgaggattatcagatcataatcaccggtcatcgccagatggtagccattcagcccgttgtcggccaaatcgaccacaaaaccggcttcggttaaccctttggtcaagtattctccggttttcttttcatcttcgacaatcaacagtttcatatttcctccgcatgttgcccgggcaattctagagtagcgggatcagatggcaatcgcttattggcaaaatgacaattttgtcatttttctgtcaccggaaaatcagagcctggcgagtaaagttggcggcataaaatcaccagaaattatgagcctatgtctccttgtaaacttctgccattttgtgtggcccttgcgctaaccggttgtagtctggcaccggattatcagcgtccggcaatgcccgtgccgcagcagttcagtctcagccagaacggcctggttaacgcagcagataactatcagaacgcgggctggcgcaccttttttgttgataatcaggtgaagacgctgattagcgaggcgctggtgaataatcgggatttgcgcatggcgacgctgaaagtgcaggaggcacgggcgcaatatcgtctgaccgatgccgaccgctacccacagctcaatggcgagggcagcggcagctggagcggtaatcttaaagggaataccgccacgacacgggagtttagcaccggccttaacgccagctttgacctcgattttttcggtcgcttaaagaacatgagcgaagccgagcgacaaaattatttagccactgaggaagctcagcgcgcggtgcatattctgctggtttctaatgtcgcgcaaagctatttcaatcagcaactggcgtatgcgcaattgcaaatagccgaagaaacgctgcgtaattatcagcagagttatgcgtttgtcgaaaaacaactgttgacaggtagcagtaatgttctggcgctggaacaggctcgcggggtgatagaaagtacccgcagcgacatcgctaaacgtcagggggaactggcgcaggcgaataatgcattgcaactgttgctgggaagctacggcaagctgccgcaagcgcagacagtaaacagcgacagcctgcaaagcgttaaattaccggcgggattgagcagccaaatcttattgcagcgcccggatattatggaagctgaacacgcgttaatggcggctaatgccaatattggcgctgcacgcgcggcattttttccgtctataagcctgaccagcggaataagcaccgccagtagcgatctaagcagtttatttaacgccagcagcgggatgtggaattttatacccaaaattgagatccccatttttaatgccggacgcaaccaggccaatctggatatcgccgaaattcgccagcagcagagcgtggtgaattatgaacagaaaatccagaacgcctttaaagaagtggcagatgcgctggcattacgtcaaagcctgaacgatcaaattagcgcccagcagcgttatctggcaagcctgcaaattactttgcaacgggcgcgggcattatatcagcacggcgcagtaagttatctggaagtgctggatgccgagcgttctttatttgcaacccgacaaactttacttgatctgaattatgcccgtcaggttaacgaaatttctttgtataccgcacttggtggcggttgacagcaatatactcgtcatacttcaagttgcatgtgctgcgtctgcgttcgctcaccccagtcacttacttatgtaagctcctggggattcactcgcttgtcgccttcctgcaactcgaattatttagagtatgacttttaactccaggagagaataaatgaaaaaagcactgcaagtcgcaatgttcagtctgtttaccgttattggctttaatgcccaggctaacgaacatcatcatgaaaccatgagcgaagcacaaccacaggttattagcgccactggcgtggtaaagggtatcgatctggaaagcaaaaaaatcaccatccatcacgatccgattgctgccgtgaactggccggagatgaccatgcgctttaccatcaccccgcagacgaaaatgagtgaaattaaaaccggcgacaaagtggcgtttaattttgtccagcagggcaacctttctttattacaggatattaaagtcagccagtaacccaggtttaatgagatgaaaaaaatcgcgcttattatcggcagcatgatcgcgggcggtattatttctgcggcaggttttacctgggttgcaaaggcggaaccgcctgcagaaaaaacgagcaccgcagaacgtaaaatcttattctggtacgacccaatgtatcccaatacgcggttcgataaaccaggtaaaagcccgtttatggatatggatctggtgccgaaatatgccgatgaagagagttctgcgtctggtgtgcgcattgacccgactcagacgcagaatctgggggtgaaaacggctaccgtcacgcgcggaccgctgacttttgcccagagtttcccggcgaatgtcagttacaacgagtatcagtatgccattgtgcaggctcgcgctgccgggtttatcgacaaggtgtatccgcttaccgtgggcgataaagtacaaaagggcacaccgcttctcgacctgaccattcctgactgggtggaagcgcagagtgagtatttactgctgcgcgaaaccggcggtacggcgacccagactgaaggcattcttgagcggctgcgactggcgggaatgccggaggcggatattcgccgcctgatcgccacgcaaaaaatccagactcgctttacgctcaaagcgcccattgatggcgtgatcaccgcgtttgatctgcgcgcgggaatgaatatcgccaaagataacgtggtagcgaaaattcagggtatggacccggtgtgggtcactgctgcgatcccggagtctatcgcctggctggtgaaagatgccagccagtttaccctcaccgttccggcgcgaccggataaaacactcaccatccgcaaatggacgctgctacctggcgtggatgccgcgacccgcacgctgcagctgcgtctggaagtcgacaacgccgacgaggcgctaaaaccgggcatgaacgcctggttgcaactcaacaccgccagcgaaccgatgctgctcattccgagtcaagcgctgattgataccggcagcgaacagcgggtgattaccgttgatgccgacgggcgctttgtaccgaaacgcgttgctgttttccaggcaagccaaggcgtcaccgcattacgctctggtctggcggaaggtgaaaaggtggtttccagcggcctgttcctgattgattccgaagccaatatttctggcgcactggagcggatgcgctctgaaagtgcgacccatgcgcattgagggaataaccaatgattgaatggattattcgtcgcagcgtggcgaaccgttttttggtgctgatgggcgcgttgtttctgagcatctggggcacctggaccatcattaatacgccagtggatgcgctgccggatctctccgatgtgcaggttattattaaaaccagctatcccggtcaggcaccacaaatcgttgaaaatcaggtgacttatccgctaaccaccaccatgttgagcgtgcctggcgcgaagactgtgcgcggtttcagtcagtttggcgactcttatgtgtatgtcattttcgaagatggcaccgatccgtactgggcgcgtagccgggtgctggagtacctcaaccaggtacagggtaagctgcctgcgggagtcagcgccgagctggggccagatgccacgggtgttggctggatctatgaatatgcactggtggatcgcagcggtaagcacgatctggccgatttacgcagtttacaggactggtttctcaaatatgagctgaaaaccatccctgacgttgcggaagtggcgagcgtgggcggtgtggtgaaagagtatcaggtggttatcgatccccagcgcctggcgcagtatggcatcagtctcgccgaagtaaaaagcgcgctggatgctagtaaccaggaagcgggcggtagcagcatcgaactggcggaagcggaatatatggtgcgcgccagcggctatctgcaaacgctcgacgactttaatcacatcgctttaaaagccagtgaaaatggcgtgcccgtttatctgcgcgatgttgcgaaggtccagattggcccggagatgcgccggggcattgccgaactaaacggcgaaggcgaagtggcgggcggggtggtgatcctgcgatccggcaaaaacgcccgagaagtgatcgccgccgtgaaggacaaactggaaacgctgaaaagtagtctgccggaaggcgtggagatagttacaacatacgatcgcagccagctcattgaccgcgccatcgacaacctcagcggcaagttgctggaagagtttattgtggtggcggtagtctgtgcgctgtttctctggcatgtgcgcagcgcgctggtggcgattattagcttgccgctggggttgtgtattgcttttattgtcatgcacttccagggactgaatgccaatattatgagcttgggtggcattgcgattgccgtcggggcgatggtcgatgctgctatcgtcatgatcgagaatgcgcataaacggctggaagagtggcagcaccagcatcctgacgccacgctggataataaaacgcgctggcaggtgatcaccgatgcgtctgttgaagtggggccggcgctatttatcagtctgctgattatcacgttgagctttatcccgatcttcaccctggaagggcaggaagggcgtctgtttggcccgttggcgttcaccaaaacgtatgcgatggcgggtgcggcgctgctggcgatcgtagtgatcccgatcctgatgggctactggatccgtggcaaaattccgccggaaagcagtaacccgctcaatcgctttttgattcgtgtttatcatccgctgttgctgaaagtactgcactggccgaaaaccacgctgctggtggcggcgcttagcgtgctgacggttctctggccgctcaataaagttggcggggaatttttaccgcagatcaatgaaggcgacttgttgtatatgccaagcacgctgccggggatttccgcagcagaggcggcgagtatgctgcaaaaaaccgacaagctaattatgagcgtacctgaagtggcgcgggtatttggcaaaaccgggaaagcggaaaccgccaccgattctgctccgctggagatggtagaaacgaccatccagcttaagccgcaggagcagtggcggccaggcatgacgatggacaaaatcattgaggaactggataacaccgtgcggctgccggggctggcgaatctgtgggtgccgccaattcgtaaccgtatcgatatgctcagtaccggcattaaaagccccatcggcattaaagtttccggcactgtgctggcggatatcgacgcgatggctgagcaaattgaagaagtagcgcgaacggtgccaggcgtagcttctgcgcttgccgagcggctggaaggtgggcgctatatcaacgttgagattaaccgtgaaaaagccgcacgttacggtatgacggtggcggatgtgcagttgtttgtgacttctgcggtgggcggggcgatggttggcgaaacggtggaagggattgcccgttatccaattaatctgcgttatccgcaaagctggcgcgatagtccgcaggcactgcgccagctgccgatcctgacgccgatgaagcagcaaatcaccctggcagacgtggccgacattaaagtctctaccggaccgagcatgctgaaaaccgagaatgcgcgcccgacgagctggatttatatcgatgcccgcgatcgtgacatggtgagcgtggttcacgatttgcaaaaagcgatagctgaaaaagtgcagttaaaaccgggcaccagcgtggcattctccgggcagttcgagctactggagcgcgccaaccataagcttaaactcatggtgccgatgacgttgatgattatcttcgtgctgttgtatctggcgttccgtcgggtgggcgaagcgttgctgattatcagcagcgtaccgtttgcgctggtgggcggcatctggttgctgtggtggatgggctttcatctttccgtggcgacgggcactggctttatcgccctcgccggggtcgccgccgaatttggcgtggtgatgctgatgtatttacgtcacgccatagaggccgtgccgagcttgaataatccacaaacattcagcgagcagaagctggatgaggcgttatatcacggcgcggtcctgcgcgtgcgcccgaaagcgatgacggtggcggtgattatcgccggtctgctgccgattctgtggggaacgggggctggtagtgaggtgatgagccggattgccgcgccgatgattggcggcatgatcaccgcacctttgctgagcctgtttattatcccggcggcgtataagctgatgtggctgcaccgacatcgggtacggaaataaaagcaggataccccgtttaaccgtgtggattgtgtcttgcgacgatgggcactaaatgttaaaaggtgcccctcaacaaaaaagacacacaggggaaaggcgtgaaaaacgcgagtaccgtaagcgaagatactgcgagcaatcaagagccgacgcttcatcgcggattacataaccgtcatattcaactgattgcgttgggtggcgcaattggtactggtctgtttcttggcattggcccggcgattcagatggcgggtccggctgtattgctgggctacggcgtcgccgggatcatcgctttcctgattatgcgccagcttggcgaaatggtggttgaggagccggtatccggtagttttgcccactttgcctataaatactggggaccgtttgcgggcttcctctctggctggaactactgggtaatgttcgtgctggtgggaatggcagagctgaccgctgcgggcatctatatgcagtactggttcccggatgttccaacgtggatttgggctgccgccttctttattatcatcaacgccgttaacctggtgaacgtgcgcttatatggcgaaaccgagttctggtttgcgttgattaaagtgctggcaatcatcggtatgatcggctttggcctgtggctgctgttttctggtcacggcggcgagaaagccagtatcgacaacctctggcgctacggtggtttcttcgccaccggctggaatgggctgattttgagcctggcggtaattatgttctccttcggcggtctggagctgattgggattactgccgctgaagcgcgcgatccggaaaaaagcattccaaaagcggtaaatcaggtggtgtatcgcatcctgctgttttacatcggtagtctggtggttttactggcgctctatccgtgggtggaagtgaaatccaacagtagcccgtttgtgatgattttccataatctcgacagcaacgtggtagcttctgcgctgaacttcgtcattctggtagcaagcctgagtgtgtataacagcggggtttactctaacagccgcatgctgtttggcctttctgtgcagggtaatgcgccgaagtttttgactcgcgtcagccgtcgcggtgtgccgattaacagcctgatgctttccggagcgatcactagcctggtggtgttaatcaactatctgctgccgcaaaaagcgtttggtctgctgatggcgctggtggtagcaacgctgctgttgaactggattatgatctgtctggcgcatctgcgttttcgtgcagcgatgcgacgtcaggggcgtgaaacacagtttaaggcgctgctctatccgttcggcaactatctctgcattgccttcctcggcatgattttgctgctgatgtgcacgatggatgatatgcgcttgagtgcgatcctgctgccggtgtggattgtattcctgtttatggcatttaaaacgctgcgtcggaaataaggcattcacgctacatccgacaaaacgatgtcaaccatccgaaaccgctctcatccattcgatgagagcggtttttttaattactgcttaaatgcacccgccagagagcgaatatcattgccggttggcgagtaatccccgcatatccggttgtcaggtcaggatggtaaggcacctgctttacactttcgcccgtggtcagtgatggctgcgggcgaatcgtaccagatgttgtcaattaatcgtgttggcacagcgttatgactatcttttcttttatctgccagtgcacagcaaacatctcattctcacgatgaatgatgacctgctgtttattccagctaattatctgatagtccagaaaacctgcatcagtttggatctcacttgccttaaatgcgctctctttggcggaaaatgccagtgtcagcgccagagaaaaggctaaaccgcagtctgcgagtcgctcgtgttccgctggtgtaataatgttgtctgtcaattctcttgcggtttgtacagaaaaaatttcttctatatcaatgccaatcggttgacgagataccacggctaatgccgtagtcccacagtggctaatactgccgtatacctccgcaggccagacaggttggcgtagctcgccgattgcgggcacacatttatagccatattcccgcaaagcataaacagcagcgatccgtccggctaaatgctctgttttacgtttacgtccagcgtgttgcagttgtgcgtagtgcggcagccagagtaaatcctgttcacaaaaattcgccggatcgaactcaacaaaatgcagcgtatgtccggcaaaggggagggaggtatgcgtagttttcatatcgaccatattcgagactgatgacaaacgcaaaactgcctgatgcgctacgcttatcaggcctacatggtcctgcaatatattgaattggcaagatttttgtaggccggataaggcgttcacgccgcatccggcatgaacgacgcgcactttgtcaacaatctgacgttagcatcagaagtgggtgtttacgctcatataccacgtacgtcccggctcgttataggtatacgccccggcaccggcgatatagttggcccctgccgaatcgcccgtggtctgggcattacccgcacgccacaaacgtttgtcgaacagattgtccacgccgccggtcagactgacattcttcgtcacatcccaggtcgcgctcaggccaacaatgctgtaaggactaatttctttggtttccggtccaaccgctggctgacctttatagttgtacttcttcggctgctgcttgccgtaccaggtgaaggtcgtttgcatgctcaaatcttcccgtgcctgccagctcagcgtactgttcaacgtatactccgggatgatgctcaaacggtcgcccgtggttttgttttcactcttcagcatataagtgatgttattggtccacatcaccgtttcgctaaccggtacgtttaagcttccttccagaccttcaaccaccgctttcggcacgttatcccactgatagagatcggtgccgactgcgttttgccctacagccacatagcccgcttcaatcttattgcgataatcgttacggaaccaggtgacgcccgccagccacccgtcgcgtttgaactccagaccaatctctttgttgatgctggtttctgctttcaggtcatcgttaccttgcagatagcagccgcccgcgctggcatagcaaccctgacctttactgtagagaatgtagttcgggttagtctggtacaggctcggcgctttataagcacgggcgatgcccattttcagcgtgaagtcatcgcctaaaccttggcttatgttcagcgccgggctccagttattgccgacaatactgtgatgatcgaaacgcagccccggcgttacgatggtgctgtcagtcagctccatgttgttttcggcaaacaggctgaaaatttctgctttactatacgggctacggtcggtggtactcacgccatcaatagcgccaccggtattcgttccggtcagtgcctgggtgttggaacttaagtccttcatccgttgctgattccactccgtacccagcgtcagcgtctggttaacgaggaaatcaatcggcaggttaacttcgctgtgcagcatcacgtcatcaagatcgatatcgacgaaatcctgtgtcgctttttcgttaaatttcccttcggtaccgcccgccagaccttccggaatacggctgttacgggtgtgttcgtactgcacccagttgctggtggtcacgccgttatcccagccaccgttccaggtcagcgcgtagttctggcgatacagacggttggtttcatcgccatatttgctgcgggtataggaatcggagttggtattctgggtgtcgcccgcatacaggttaccctggcggctgtaacctgcttccagttccaggctttgcaatggcgcgaaatcccagcgcaccacgccattaatatctttgttgattaccccttcgcgcccggctggtaacgtcgtggcatacgttccggcacgcgcggactgatggccctggttgatatcccacgcgtcagcctgggttttgtcgaggttgccatacaaacggaagctgaattcgtcgcccagcggaccggtcaggctaaagttagtgcgtttggtggcaccttcctctttatgttctggcgcattgaaatatgcgtcccaggagccgtgccactcgccgctgccttttttggtaatgatgttaaccacgccgcccgccgcgccgttgccataacgcgcagctgccggaccacgcagaacttcaatacgttcaatcatttcaggtggcacccaggaagtatcaccacgggtatcgcgctcgccacgccagccctgacgcacgctgttacggctgcttaccggcttgccgtcaatcaaaatcagcgtgttttccggacccataccgcgaatatcaatctgtcggttattcccacgctgaccactggtggagttaccggtcaggttaacgcctggcatggtacggatgatcttgctcacatcgcgggcaaccgggtttttgcggatttcatctgcggtgatggtgctaacgccaggcgcctgtaagttctgctcggcggcggtaacgacaatagtatcgtcatgactaacaggagtatcggtcggctcttgtgcctgcgctaccccataaatccccagattgaccaacaaggccagggaatgaatcttcttgttcattgttttattcctgcatttttgccacgaattgcaactgtcgggcatggtcgtcatcaacacgacgcatcccgctaccgcgaaaacctttgatcctgaaagacacgcagtgcagttggttaattaatgtccgcgcttcccacggcgcgccattacgctattgcaaatgcaaatagttatcaataatattatcaatatatttctgcaatcaatgaaaaattgcacagtaaacatggggttatggtgtgacggcgttaaaagtaggaagtgagagctggtggcagtcgaaacatggcccggaatggcagcgtctgaatgacgaaatgtttgaggtcactttctggtggcgtgatccccaaggttctgaagaatacagcacgataaagcgcgtatgggtctacatcactggtgtgaccgatcaccatcagaacagccagccccagagcatgcagcgaattgcaggcactaacgtctggcagtggacgacacaactcaatgccaactggcgcggcagctactgctttattcccaccgaacgcgatgacattttttctgtaccatcccccgatcgcctcgaattgcgcgaaggctggcgaaaactattaccccaggcgatagccgatccgctgaacctacaaagctggaaaggcgggcgagggcacgctgtttctgcactcgaaatgccgcaagcgcctctgcaaccgggatgggattgtccgcaagcgccagaaatacctgccaaagaaattatctggaaaagtgaacggttgaaaaagagtcggcgtgtatggatttttaccaccggcgatgcaacagcagaagaacgcccgctggcagttttgctcgatggcgaattttgggcgcaaagtatgcccgtctggccagtgctgactagcctgacccatcgtcagcaacttcctcccgccgtgtatgtgttgatcgacgctatcgacaccacgcaccgcgcccacgaactgccgtgtaatgcggatttctggctcgcagtacagcaagagttattacccctggtgaaagctattgccccttttagcgatcgtgccgatcgcaccgtggttgccgggcagagttttggtgggctttccgcgctgtatgccggactgcactggcctgaacgctttggctgtgtattaagccagagtggaagctactggtggccgcatcggggcgggcagcaagagggcgtgttacttgaaaagctaaaagctggtgaagttagcgccgaaggtctgcgcattgtgctggaagcgggtattcgcgagccgatgatcatgcgggccaatcaggcgctgtatgcgcaattacaccccataaaagaatccattttctggcgtcaggttgacggcggacatgatgcgctttgttggcgcggtggcttgatgcaggggctaatcgacctctggcaaccacttttccatgacaggagttgaatatggcattcagtaatcccttcgatgatccgcagggagcgttttacatattgcgcaatgcgcaggggtaattcagtctgtggccgcaacaatgcgtcttaccggcaggctgggacattgtgtgtcagccgcagagtcaggcgtcctgccagcagtggctggaagcccactggcgtactctgacaccgacgaattttacccagttgcagaaggcacaatgagccagcatttacctttggtcgccgcacagcccggcatctggatggcagaaaaactgagtgaattaccctccgcctggagcgtggcgcattacgttgagttaaccggagaggttgatagcccattactggcccgcgcggtggttgccggactagcgcaagcagatacgctgcggatgcgttttacggaagataacggcgaagtctggcagtgggtcgatgatgcgctgacgttcgaactgccagaaattatcgacctacgaaccaacattgatccgcacggtactgcgcaggcattaatgcaggcggatttgcaacaagatctgcgcgtcgatagcggtaaaccactggtctttcatcagctgatacaggtggcggataaccgctggtactggtatcagcgttatcaccatttgctggtcgatggctttagtttcccggccattacccgccagatcgccaatatttactgcacatggctgcgtggcgaaccaacgcctgctagcccatttacgcctttcgctgatgtagtggaagagtaccagcaataccgcgaaagcgaagcctggcagcgtgatgcggcattctgggcagaacagcgtcgtcaactgccgccgcccgcgagtctttctccggcacctttaccggggcgcagcgccagcgcagatattctgcgcctgaaactggaatttaccgacggggaattccgccagctggctacgcaacttagtggtgtgcagcgtaccgatttagcccttgcgctggcagccttgtggctggggcgattgtgcaatcgtatggactacgccgccggatttatctttatgcgtcgactgggcagcgcggcgctgacggctaccggacccgtgctcaacgttttgccgttgggtattcacattgcggcgcaagaaacgctgccggaactggcaacccgactggcagcacaactgaaaaaaatgcgtcgtcatcaacgttacgatgccgaacaaattgtccgtgacagcgggcgagcggcaggtgatgaaccgctgtttggtccggtactcaatatcaaggtatttgattaccaactggatattcctgatgttcaggcgcaaacccataccctggcaaccggtccggttaatgaccttgaactggccctgttcccggatgtacacggtgatttgagtattgagatcctcgccaataaacagcgttacgatgagccaacgttaatccagcatgctgaacgcctgaaaatgctgattgcccagttcgccgcggatccggcgctgttgtgcggcgatgtcgatattatgctgccaggtgagtatgcgcagctggcgcagctcaacgccactcaggttgagattccagaaaccacgcttagcgcgctggtggcagaacaagcggcaaaaacaccggatgctccggcgctggcagatgcgcgttacctgttcagctatcgggaaatgcgcgagcaggtggtggcgctggcgaatctgctgcgtgagcgcggcgttaaaccaggggacagcgtggcggtggcactaccgcgcagcgtctttttgaccctggcactccatgcgatagttgaagctggagcggcctggctaccgctggataccggctatccggacgatcgcctgaaaatgatgctggaagatgcgcgtccgagcctgttaattaccaccgacgatcaactgccgcgctttagcgatgttcccaatttaacaagcctttgctataacgccccgcttacaccgcagggcagtgcgccgctgcaacttagtcaaccgcatcacacggcttatatcatctttacctctggctccaccggcaggccgaaaggggtaatggtcgggcagacggctatcgtcaaccgcctgctttggatgcaaaatcattatccgcttacaggcgaagatgtcgttgcccaaaaaacgccgtgcagttttgatgtcagcgtgtgggagtttttctggccgtttatcgcaggggcaaaactggtgatggctgaaccggaagcgcaccgcgacccgctcgctatgcagcaattctttgccgaatatggcgtaacgaccacgcactttgtgccgagcatgctggcggcatttgttgccagcctgacgccgcaaaccgctcgccagagttgcgcgacgttgaaacaggttttctgtagtggtgaggccttaccggctgatttatgccgcgaatggcaacagttaactggcgcgccgttgcataatctatatggcccgacggaagcggcggtagatgtcagctggtatccggcttttggcgaggaactggcacaggtgcgcggcagcagtgtgccgattggttatccggtatggaatacgggtctgcgtattcttgatgcgatgatgcatccggtgccgccgggtgtggcgggtgatctctatctcactggcattcaactggcgcagggctatctcggacgccccgatctgaccgccagccgctttattgccgatccttttgccccaggtgaacggatgtaccgtaccggagacgttgcccgctggctggataacggcgcggtggagtacctcgggcgcagtgatgatcagctaaaaattcgcgggcagcgtatcgaactgggcgaaatcgatcgcgtgatgcaggcgctgccggatgtcgaacaagccgttacccacgcctgtgtgattaaccaggcggctgccaccggtggtgatgcgcgtcaattggtgggctatctggtgagccaaagcggcctgccgttggataccagcgcattgcaggcgcagcttcgtgaaacattgccaccacatatggtaccggtggttctgctgcaacttccacagttaccacttagcgccaacggcaagctggatcgcaaagccttaccgttgcctgaactgaaggcacaagcgccagggcgtgcgccgaaagcgggcagtgaaacgattatcgccgcggcattcagcagcttgctggggtgtgacgtgcaggatgccgatgctgatttcttcgcgcttggcggtcatagcctactggcaatgaaactggcagcgcagttaagtcggcaggttgcccgccaggtgacgccggggcaagtgatggtcgcgagtactgtcgccaaactggcaacgattattgatgctgaagaagacagcacccggcgtatgggattcgaaaccattctgccgttgcgtgaaggtaatggcccgacgctgttttgtttccatcctgcgtccggttttgcctggcagttcagcgtgctcagccgttatctcgatccacaatggagcattatcggcattcagagtccgcgccccaatggccccatgcagacggcggcaaacctggatgaagtctgcgaagcgcatctggcaacgttacttgaacaacaaccgcatggcccttattacctgctggggtattcccttggcggtacgctggcgcagggtattgcggcgcgactgcgtgcccgtggcgaacaggtggcatttcttggcttgctggatacctggccgccagaaacgcaaaactggcaggaaaaagaagctaatggtctggacccggaagtgctggcggagattaaccgcgaacgcgaggccttcctggcagcacagcagggaagtactagtacggagttgtttaccaccattgaaggcaactacgctgatgctgtgcgcctgctgacgactgctcatagcgtaccgtttgacggtaaagcgacgctgtttgttgctgaacgcacacttcaggaaggtatgagtcccgaacgcgcctggagcccgtggatagcggagctggatatctatcgtcaggattgtgcgcatgtggatattatctctccagggacgtttgaaaaaattgggccgattattcgcgcaacgctaaacaggtaaattaatattatttataaacccataattacagaaaataattatgggttttttatttgtttgatttataggtttgatgaatatttctcttaaatagagtgaatgttgcattcagtggaaggaatttacaaacttcagcttcggataattatcaccaactggtaaagtgagcgccgtggagatttccccctattggactcattttcaggttataccccatgagtagtctgaatattaaacagggaagtgacgctcattttcccgattatcctctggcgagccccagtaataatgaaattgatttacttaatctaatcagtgttttatggcgggccaaaaaaacggtcatggcggtcgtttttgcgtttgcctgcgcaggcttgctgatctctttcatcctgccgcaaaaatggaccagcgcggcggttgtcacgcctccagaacctgttcagtggcaagagttggagaaaagtttcactaagcttcgtgtgctggatctggatatcaaaattgatcgtacagaagcatttaacctgtttatcaagaagtttcagagcgttagcttgctggaagagtacctgcgtagtagtccttatgtgatggaccaattaaaagaggcgaaaatcgacgaactggatttgcatcgcgcaattgtcgcattgagcgaaaaaatgaaagcggttgatgacaatgccagtaagaaaaaagatgaaccgagtctgtatacctcctggacgctaagttttaccgcgccaaccagtgaagaggcgcagaccgttttgagcgggtatatcgattatatctctacgttggtggtgaaagagagcctagaaaacgtccgtaataaactggagatcaaaacccagtttgaaaaagaaaaactggctcaggatcgcattaaaacgaaaaatcaacttgatgcaaacattcagcgcctcaattatagtctcgacattgccaacgcggcaggaattaaaaagcccgtttacagtaatggtcaggccgttaaagatgaccccgatttttctatttctctcggtgcagacggtattgaacgcaaactggaaatagaaaaagcggtcactgacgttgcggaactgaacggtgaattacgtaatcggcagtatcttgtcgagcaattaacaaaagcacatgtcaacgatgtgaattttacgccgtttaaatatcagttaagcccgagtttgccagtgaaaaaagacggtccgggtaaggcgattattgtgatcctttccgcgttgatcggcgggatggtggcttgtggtggcgtgctgttgcgctatgcgatggcatccagaaaacaggatgccatgatggcagaccacttagtttaactatttgcggtactaggtgccgttcgtccgagcggcaccacaagcggcgttccggcaactggatcgtcaatgatcatgcagcgcagaccataaatgcgctcaatcagttcagcagtgacaatctccttcggcgctccctgagcaacaattttcccttcccgcaatgcaatcaaatggctggcgtaacgacaggcctgattaagatcgtgcagcaccgccgccagggtatagcctttttcgcggttcagttcgcttaacaactccagcaaatcaatctgatgactgatatccagccaggtcgtgggttcgtcgagcagcataattgccgtttcctgggccagcaccatcgcgatccacgctcgctggcgttgtccgccagaaagggtatccacgctttgatctgccagatgagttattcccgtggcctgcattgctttcgttaccgcttcttcatcctctttgcgccagcgggtaaacagcggttgatgcggataacgtccacgcgccaccagctcctgcacggtgatatcgcccggcgtggtagcattttgcgccaacagaccaatccggcgtgcaacctctttactggcgtaatgttgaatgtgctcgccatccagccagacatgcccatgagcaggcgtcatcaggcggcttaaggtacgcagtaacgtggatttaccgcagccatttggcccgataattgccgtgaagtgaccatcaggtatttctacagtcagattttccgcaacggtatatttgccatatcccagggttaactgttcgccgcgcaaacgggctacactttcggtcattttttgcgagactcctgaattaacaagacgataaggtaaataccgccgaggctgacggtaacgacgccaaccggaagttgatacggcataaacagttgttgggcgcagagatcggccgccagcagtaacagcgccccgcatagcgccgcctgggttagcccccagcgagcggtgccgctaatgcgtcgggcaatgtgcggtgcgactaaagcaataaaggaaatcggcccggcaagcgctgttgccgcagcggtaagcaccactgcaaccagcatcattaacagacggctacgttcgacgctgacgcccagcgcacacgcggtatcatcgcccatttccagcaagcgcatccggcgtaccagtaaggcggcggcaatgagcatcaatataatgatgggtgcggaagggctggtttttgcccacgtcaggccgttgaggcttccggcattccacaaacctgctgttagcgccgtttctaaagacgctttcagcaacagccaggtattaaaggccaccagcatggcgcgaacgccgataccgataataatcaaccgaaaggtgtcgatgccgttgcgccaggcgagcagccagaccagcaggctagtgacaatgccgcccaccattgcactcagcgcgatagccgtcaggtcctgaccaaacagcaccatcgccaccagcacgccgctccacgccccggtgttaaagcccattacgtcagggctgccgagcgggttacgcatcaggctctgaaaaatcgcgccactgacgcccagtgctgcgccaatcaacagcgccatcagcacgcgtggtaaacgccattcggtgaccaccatcgtcatactgcgcggcgcatcgcccatcagcgcggcgaatacctggctggtttccagcgtgacggcaccgctgcgtaatccccagatacctgcaaccacacaggcggaaaccagcagcaaacaggtgatgagtaatcggcgagagacgtaaatcatgcaccacctcgcgttttacgtcgcacgaggaagatcagcaccggtgcaccaataaacgcactgaccacagaaacgcgcagttcgccgggcacaatcacccgcccgatgatatcggcaaacagcagcagggcaggggtagcaagtagcgtgacgggcaggctccagcgatgatcggcacccaccagccaacgcgccatatgcggcatcatcaggccaataaaggcaatcgggccaactattgccgtcgcactaccacaaagcacggtaatcgccagcagaccaatcaactgtgtgcgcgccacgcgactgcccagcgccgtcgcggtgtcgctgccgaggctcaaactgttcagcgcgcgactcagtaatagcgcagttgctccggcgatcagcaccgggatcagcaccacttttaaggtatgtagattgcgaatatccaggctaccggcttgccagaaacgcaactgatcgtagacgtcaggattaagcagggcgatgccgctggtcagtccttccagcaccgccgccagcgccacgcccgccagggttaaacgcaccggacttaactgcccgccgccctgactgccggtaaaggcaacaatcaaactggccaccagcgccccggcgaaggccatcgccagttgttcctgcgcggaagagtaaccaaacagcgccgcacccagcacaatggcaaagctggctccggcgttcacgccaagcaagccggggtcggcaagtgggtttcgggtgagggtttgcattaacgccccggcaaggccaagcgcgccgcctgccagtaaaccggcaagggtacgcggcagccgcgcgtcgagcacgatggtgcagtcggcgctctggcaggtgccggagaaggcctccagcactacggaagcggggagactttttgccccaatgagcaggcttaatgccgtcgcgataatcagtaataacagcaatccgggcacggcaatggcgcgtgtcacggcaacagaaccagacatacgaacttccatgataatgaaattaattatcgttatcgatcttatttggatatgttagcatgtgcagcctaagaataggtatttaaaatatttgatggcaaggcattgtaatgaataaacaatcctggctgcttaacctcagcctgttgaaaacgcacccggcgtttcgcgcagtattcctcgctcgtttcatcagtattgtgtctctgggtttgctcggcgtcgcggtgccggtgcagatccagatgatgacacattccacctggcaggtggggcttagcgtgacgctgaccggcggcgcgatgtttgttggcctgatggtcggcggtgtgctggcggatcgctatgagcgcaaaaaagtgattttgctggcgcgcggcacctgtggcattggcttcattggactgtgccttaatgcactgctgccggagccgagtttgctggcaatctatttacttggtttatgggatggttttttcgcaagccttggcgttacggcgctattggcggcgacaccagcactggtagggcgtgaaaacttaatgcaggccggggcgatcaccatgttgaccgtgcgtctggggagcgtgattagccccatgattggcggtttattgctggcgaccggtggcgtagcctggaactacgggctggcggcggcgggcacgtttattaccttgctaccgttgttaagccttccggcgttgccaccgccaccgcagccgcgtgagcatccgttgaaaagtttactggcaggatttcgttttctgcttgccagcccgctggtgggcgggattgcgctgctgggtggtttattgacgatggcgagcgcggtgcgggtactgtatccggcgctggctgacaactggcagatgagtgcggcacagattggttttctctacgcggcgatcccgctcggcgcggctattggtgcgttaaccagcgggaagctggcacatagtgcgcgaccagggttattgatgctgctctccacgctgggaagcttcctcgccattggtctgtttggcctgatgccgatgtggattttaggcgtggtttgtctggcgctgttcggctggttgagtgcggtcagcagcttgctgcaatacacaatgctgcaaacgcaaaccccggaagcgatgttagggcggattaacggtttgtggacggcgcagaacgtgacgggcgatgccataggcgcggcgctgctgggtggtttgggcgcgatgatgacaccggttgcttccgcaagcgcgagcggttttggtttgttgattatcggcgtgttgttattgctggtgctggtggagttgcgacattttcgccagacgccgccgcaggtgacagcgtccgacagttaatgcttaaaacagcgccttaagcctatccagcacttgcatggcgctgtagtaatccagacggaacgtctcggttcccagcgcataaacctgcttgttttgtactgcaggcaggtgcgcgagcagcggattagcataaatagcatcggcatctttctgatcaccggcgaacaggaatagactctcgccatttaaccctgcagccagattttccccaccaagctgaatgatgtcatggcgtttaccctgactttggctggcatttaaccctgcgggtaacttcgccagcgtaaagccgagttgttccagcatctgcccttgtgcactttctggcgtccagagattggcactgtgtgcagcggcagtatagacaatggcagtgaccggctgcggcggtaatttgatttgctctttcgccgccgccagttgcttatcaaactgcgcaatccgctctgccgcttgtttctcatgcccggtaatttcgccaagttgcgttaacaggctctgccagcttttgtcgtcgtaattgatgattaatgtcggggcgatggtggaaagctgatcatacagtgccagcgcgctatccccgccggttgcgctaattaaaatcagatccggcatttgcgcggcaacggcttcggcgctcggttcgccgatatagagccgttgcagtttgcgttctttcgccaccttgctccactggcgtaaaaagccctggtcatccgcgacgcggttattcggcgtggtcgcgccgctggcgatcaccggagcatcaatcgccagcagactgccggtcagggtgacgctggtggaaacaatacgctgcggctggctttccagtgtatgtgtgccacggctgtcagtaatctgacgcggccagtcagcggcctgaactgcggctattccactaagcaaaagtcctgttaatagaagggcgttgcggtagagcggggcgagtctcacaaatcagcttcctgttattaataaggttaagggcgtaatgacaaattcgacaaagcgcacaatccgtcccctcgcccctttggggagagggttagggtgaggggaacagccagcactggtgcgaacattaaccctcaccccagccctcaccctggaagggagagggggcagaacggcgcaggacatcacattgcgcttatgcgaatccatcaataatgcttctcattttcattgtaaccacaaccagatgcaaccccgagttgcagattgcgttacctcaagagttgacatagtgcgcgtttgcttttaggttagcgaccgaaaatataaatgataatcattattaaagcctttatcattttgtggaggatgatatggatacgagtctggctgaggaagtacagcagaccatggcaacacttgcgcccaatcgctttttctttatgagcccgtaccgcagttttacgacgagtggatgtttcgcccgcttcgatgaaccggctgtgaacggggatagccccgacagtcccttccagcaaaaactcgccgcgctgtttgccgatgccaaagcgcagggcatcaaaaatccggtgatggtcggggcgattcccttcgatccacgtcagcctagcagcctgtatattcctgaatcctggcagagcttctcccgtcaggaaaaacaagcttccgcacgccgtttcacccgcagccagagcctgaatgtggtggaacgccaggcaattccggagcaaaccacgtttgaacagatggttgcccgcgccgccgcacttaccgccacgccgcaggtcgacaaagtggtgttgagtcggttgattgatatcaccactgacgccgccattgatagtggcgtattgctggaacggttgattgcgcaaaacccggttagttacaacttccatgttccgctggctgatggtggcgtcctgctgggggccagcccggaactgctgctacgtaaagacggcgagcgttttagctccattccgttagccggttccgcgcgtcgtcagccggatgaagtgctcgatcgcgaagcaggtaatcgtctgctggcgagtgaaaaagatcgccatgaacatgaactggtgactcaggcgatgaaagaggtactgcgcgaacgcagtagtgagttacacgttccttcttctccacagctgatcaccacgccgacgctgtggcatctcgcaactccctttgaaggtaaagcgaatagccaagaaaacgcactgactctggcctgtctgctgcatccgacccccgcgctgagcggtttcccgcatcaggccgcgacccaggttattgctgaactggaaccgttcgaccgcgaactgtttggcggcattgtgggttggtgtgacagcgaaggtaacggcgaatgggtggtgaccatccgctgcgcgaagctgcgggaaaatcaggtgcgtctgtttgccggagcggggattgtgcctgcgagcagtccgttgggtgagtggcgcgaaacaggcgtcaaactttctaccatgttgaacgtttttggattgcattaaggagcgaggatgagcattccattcacccgctggccggaagagtttgcccgtcgctatcgggaaaaaggctactggcaggatttgccgctgaccgacattctgacgcgacatgctgcgagtgacagcatcgcggttatcgacggcgagcgacagttgagttatcgggagctgaatcaggcggcggataacctcgcgtgtagtttacgccgtcagggcattaaacctggtgaaaccgcgctggtacaactgggtaacgtcgctgaattgtatattacctttttcgcgctgctgaaactgggcgttgcgccggtgctggcgttgttcagccatcagcgtagtgaactgaacgcctatgccagccagattgaacccgcattgctgattgccgatcgccaacatgcgctgtttagcggggatgatttcctcaatactttcgtcacagaacattcctccattcgcgtggtgcaactgctcaacgacagcggtgagcataacttgcaggatgcgattaaccatccggctgaggattttactgccacgccaagtcctgctgatgaagtggcctatttccagctttccggtggcaccaccggcacaccgaaactgatcccgcgcactcataacgactactactacagcgtgcgtcgtagcgtcgagatttgtcagttcacacaacagacacgctacctgtgcgcgatcccggcggctcataactacgccatgagtagcccaggaagcctgggcgtctttcttgccggaggaacggttgttctggcggccgatcccagcgccacgctctgtttcccattgattgaaaaacatcaggttaacgttaccgcgctggtgccacccgcagtcagcctgtggttgcaggcgctgatcgaaggcgaaagccgggcgcagcttgccagcctgaaactgttacaggtcggcggcgcacgtctttctgccacccttgcggcgcgtattcccgctgagattggctgtcagttgcagcaggtgtttggcatggcggaagggctggtgaactacacccgacttgatgatagcgcggagaaaattatccatacccagggttacccaatgtgtccggatgacgaagtatgggttgccgatgccgaaggaaatccactgccgcaaggggaagtcggacgcctgatgacgcgcgggccgtacaccttccgcggctattacaaaagtccacagcacaatgccagcgcctttgatgccaacggtttttactgttccggcgatctgatctctattgatccagagggttacatcaccgtgcaggggcgcgagaaagatcagattaaccgtggcggcgagaagatcgctgccgaagagatcgaaaacctgctgctgcgccacccggcggtgatctacgccgcactggtgagcatggaagatgagctgatgggcgaaaaaagctgcgcttatctggtggtaaaagagccgctgcgcgcggtgcaggtgcgtcgtttcctgcgtgaacagggtattgccgaatttaaattaccggatcgcgtggagtgtgtggatagtcttccgctgacggcggtcgggaaagtcgataaaaaacaattacgtcagtggctggcgagtcgcgcaagtgcctgaaggagagaacacgatggctattccaaaattacaggcttacgcactgccggagtctcacgatattccgcagaataaagttgactgggcctttgaaccgcaacgtgccgcgttgttaatccatgatatgcaggactattttgtcagcttctggggcgagaactgcccgatgatggagcaggtgatcgcgaatattgctgcgctgcgcgactactgcaaacagcacaatatcccggtttattacaccgcccagccgaaagagcagagcgatgaagatcgggcgctgttgaatgatatgtgggggccgggcctgacccgcagcccggaacagcaaaaggtggtggatcgcctgacgccagatgccgacgacacggtgctggtgaagtggcgctacagcgcgtttcatcgttctccgctggagcaaatgctgaaagagagtggacgtaaccagctgattattaccggggtatatgcccacattggctgtatgaccaccgcaaccgacgcatttatgcgcgatattaaaccgtttatggtggcggatgcgctggccgatttcagccgtgacgagcatttgatgagcctgaaatatgtggccggacgttctggccgggtggtgatgactgaagaattactgccagcacctatccccgccagcaaagcggcgctgcgtgaggtgatcctgccgttgctggacgagtccgatgaaccgttcgatgacgacaacctgatcgactacggtctggatagcgtgcgcatgatggcgctggcggcgcgctggcgcaaagtgcatggtgatatcgactttgtcatgctggcgaaaaacccgaccatcgacgcctggtggaagctactctcccgcgaggtgaaataatggatttcagcggtaaaaatgtctgggtaaccggcgcaggtaaaggtatcggctacgccacggcgctggcgtttgttgaggcgggagcgaaagttacaggttttgatcaagcgttcactcaggagcaatatccctttgcgaccgaagtgatggatgttgccgacgctgcgcaggtcgcgcaagtgtgtcagcgactgttagctgaaacggagcgactggacgcgctggtcaatgcggcgggaattttacgcatgggcgcgaccgatcagctcagtaaagaggactggcagcagacttttgcggttaacgtcggcggtgcgtttaacctgttccagcaaaccatgaaccagtttcgccgtcagcggggcggggcgattgtcactgtggcgtccgacgccgcgcacacgccgcgtattggcatgagtgcttatggcgcaagcaaagcggcgctgaaaagcctggcgttgagcgtcgggctggaactggcgggtagcggcgtgcgctgtaatgtggttagccctggctccaccgacaccgatatgcaacgcacgctgtgggtgagcgatgacgccgaagaacagcgtattcgcggctttggcgagcagtttaaactcggcattccgctggggaaaatcgcccgtccacaagagatcgccaacacgattttgttcctcgcctctgacctcgccagccatattaccctacaggatattgtggtcgatggcggcagtacgctgggggcataagcatgatctggaaacgccatttaacgctcgacgaactgaacgccaccagcgataacacaatggtggcgcatctgggaattgtgtatacccgtctgggcgatgatgtgctggaagccgaaatgccggttgatacccgtactcatcagccgttcggtttactacatggcggcgcgagcgcggcgctggcggaaacgctgggaagcatggccggatttatgatgacccgcgacggacagtgtgtggtaggcacagaacttaatgcaacacaccatcgcccggtgtctgagggaaaggtacgcggcgtctgccagccgctgcatcttggtcggcaaaatcagagctgggaaatcgtcgttttcgatgaacaggggcggcgttgctgcacttgtcggctgggtacggcagttttgggatgaacccgacagaattagatgagattgcaggaaaactcggttaacggagtgatcgagttaacattgttaagttaaatattggtttcaactccgatttacatggttgctgtgttgttaaattgtacaaagatgttatagaaacaaaatgtaacatctctatggacacgcacacggataacaactatgaacaaaagtgggaaatacctcgtctggacagtgctctctgtaatgggagcatttgctctgggatacattgctttaaatcgtggggaacagatcaacgcgctgtggattgtggtggcgagcgtctgtatctatctgatcgcttaccgtttttatgggctgtatatcgccaaaaatgtgctggcggttgacccgacgcgtatgacgccagcggtgcgccataacgacgggctggactatgtgccgacggacaagaaagtgctgttcggtcaccattttgcggccattgccggagcaggtccgctggtggggccggtactggcggcgcaaatgggctacctgccggggatgatctggctgctcgctggggtggttctcgccggtgcggtgcaggatttcatggtgctgtttgtttctacgcgccgtgacggtcgcagcctgggtgagctggtcaaagaagagatggggccaaccgccggggtgattgcgctggtggcctgctttatgatcatggtcattatccttgcagtgctggcgatgatcgtggtgaaagccctgactcatagcccgtggggaacatataccgttgcgttcaccattccgctggcgctgtttatggggatctacctgcgctatctgcgtccggggcgtattggcgaagtgagcgtcatcggtctggtattcctgattttcgccattatctctggcggctgggtggcagaaagtccgacctgggcaccgtactttgactttaccggcgtgcagttgacctggatgctggtgggttacggttttgtggcggcggtgctgccggtgtggttactgctggccccgcgtgactacctctctaccttcctgaaaatcgggactatcgtcggtctggcggtaggcattttgattatgcgcccgacgctgaccatgcctgcgctgaccaaatttgtcgatggcactggcccggtatggaccggtaacctgttcccgttcctgtttatcaccatcgcctgtggcgcggtgtctggcttccatgcgctgatctcttctgggaccacgccgaagatgctggcgaacgaagggcaggcgtgctttatcggctacggtgggatgttaatggaatccttcgtggcgattatggcgctggtttccgcctgtatcatcgatccgggcgtgtattttgccatgaacagcccgatggcggtgctggctccggcagggacggcggatgtggtcgcttctgccgcgcaggtggtgagtagctggggctttagcattacaccagatacgctaaaccagattgccagcgaagtgggtgaacagagcatcatttcccgtgcgggcggtgcgccgacgctggcggtggggatggcctacattctgcacggcgcgctgggcggcatgatggatgtggcgttctggtatcacttcgccattttgtttgaagcactgtttattctgacggcggtggatgcaggtacgcgtgctgcgcgctttatgttgcaggatctgctgggcgtggtgtctcctggcctgaagcggaccgatagtctgcctgctaacctgctggcaacagcgctgtgcgtactggcgtggggctacttcctccatcagggcgtggtcgatccgctgggcggcattaacactctgtggccgctgtttggtattgccaaccagatgctggcagggatggcgctgatgctctgtgccgtggtgttgttcaagatgaaacgtcaacgttacgcctgggtggcgctggtaccaacggcctggctgctgatttgtaccctgaccgcaggctggcagaaagcgtttagcccggatgcgaaagtcggcttcctggccattgctaataagttccaggcaatgatcgacagcggcaatattccgagccagtatactgagagtcagctggcgcaactggtgttcaacaaccgtctggatgccgggttaaccatcttctttatggtggtcgtggtggttctggcactgttcagcattaagacggcacttgcggcattgaaagatccgaagccaacggcgaaagaaacgccgtatgaaccaatgccggaaaatgtcgaggagatcgtggcgcaggcaaaaggcgcacactaaagtcagagtgagggggggatgttggcgaatgttggcttagtgcccagggttccctctcaccctaaccctctccccggtggggcgaggggactgaccgagcgcgttgatagcatttgtaggccggataaggcgttcacgccgcatccggcactctttcagcaacatggttagcggaggccaagatgtttgatagtctggcaaaagccggaaaatatttaggtcaggcggcgaagctgatgattggtatgcctgattacgacaactatgtcgaacatatgcgggttaaccatcccgatcaaacgccgatgacctacgaagagtttttccgtgagcggcaggacgcgcgctacggtggaaaaggcggcgcgcgctgctgctaaatttgtacgtcaggctttaaagctttccacttttttgaacgctgcacgcaacgtatctggtgtcagcgtgactggcaggtaatgaatggactccaccggacgcagggtgtgggcaatcactttgtcgatctccgcctgattattgatatccacttccagctccgccagtgtagtcggcagatgaaaacgctgatacgctccagttaattgcgccagcacatcatcctgacccagcaaggcgctttgcaccagaattccgtaggcgactttggtgccgtggagaaacttctcggtttgcggcagcacggtcagaccgttatgcacggcatgagctgccgccacacgcgtaaaacgatcgcccagaccaccaaccatcccaccaccagcaataatagcatccaccacatcgcaaaaactttgcgttaactgttgattttgctgatcgctcagcgcctgttcgctactgtttaacaagacgtcgcgaatggcttgcgcattattgatccccagtcgcacggttagcggcaacgtttctggttgcggagccagcaccaccgcttcataccatttcgccagcgtgtcaccgatccccgccagcagatattgttgcggtgcattgaggataatctccggttccaccagcaccataaaattggcgtcgtcgaaaatctcataatgcagcgcctgtccggcatcattataccagacggagagcggtgtccaggcggcgcaggtggcggcgatcgtcggaacggcaacaaacggcagaccgagacggcgggcgagggctttcgcggtgtcgagcagtgcaccgccaccgacgccaatcaccacgctgcggtcgtcaccggactcagccgccagttgttgtacatcgctttcgctgcaatgaccgcgaaacaaaatatgctttgcccctggcagtccaaacgctggcggaagtttggtttgcgccgcagcaatggcgcgtttgccgtagatccacaccgcgcgagaaagttgttcatcagtgaaaaaatcgtgcaggtgattgaaacttcctggatgactaaagtagttagccgggccgacgaccacgcggataggattgtgaggcatgttgtgttgtccttattgttttatttagacatctaaacgtcttgattgccaaatactagcatcgtgttatagtgccttcaacacgcaacttcgtcaggtacaataaaaatgacaaataaccctctgattccacaaagcaaacttccacaacttggcaccactattttcacccagatgagcgcgctggcgcagcaacaccaggcgattaacctgagccaaggctttcctgattttgatggtccgcgctatttacaggagcggctggcgcaccacgttgcacagggggcaaaccaatacgcgcccatgaccggcgtgcaggccttgcgcgaggcgattgctcagaaaacggaacgtttgtatggctatcaaccagatgccgatagcgatatcaccgtaacggcaggggcgacggaagcgttatacgcggcgattaccgcactggtgcgcaatggcgatgaagtgatttgttttgatcccagctatgacagttacgcccccgccatcgcgctttctgggggaatagtgaagcgtatggcactgcaaccaccgcattttcgcgttgactggcaggaatttgccgcattattaagcgagcgcaccagactggtgatcctcaacactccgcataaccccagtgcaactgtctggcagcaggctgatttcgccgctttgtggcaggcgatcgccgggcacgagatttttgtcattagcgatgaagtctacgagcacatcaactttagtcaacagggccatgccagtgtgctggcgcatccgcagctgcgtgagcgggcagtggcggtttctagttttggcaagacctatcatatgaccggctggaaagtgggttattgtgttgcgccagcgcccatcagcgccgaaattcgcaaggtacatcagtatctgacctttagcgtgaataccccggcacagctggcgcttgctgatatgctacgtgcagaacctgagcattatcttgcgttaccggacttttatcgccagaagcgcgatattctggtgaatgctttaaatgaaagccggctggagattttaccgtgtgaaggtacatactttttgctggtggattacagcgcggtttctaccctggatgatgttgagttttgccagtggctgacgcaggagcacggcgtagcggcgattccgctgagcgtgttttgcgccgatcccttcccacataaactgattcgtctctgttttgccaagaaggaaagcacgttgctggcagcagctgaacgcctgcgccagctttaattatttaaccgtccaggcgcgggaatattgacggtcggcaaacaactcttgcaggccgttaatttgcttcaggcgcagcacttcgtcgctgtccattcccagctctttgccaattttattatcgtcccatcccaactggctaagttcacggacgatttcgctcatggcggtgatttgatggcgtccacgagcgcgattatgacgaatagtcgcggcgatgcgttgattacgcgtaccttccagacaggtcaccggcaaataaccttttaagcgtaattttaaactactactgcctttaccaatttcatggcggtgaaaaccatccacgatttccatggcatttttatccgtatgtgtgaccacaatgggttgggtaaaaccatctatttcaatggatttttgcagcagttttttttcgggtggtgccacgttgtttgggttgtaatcattaggcataagttggctgtttttaacccacagaacgcaatccactggctcttcacgaaaggggctaacctgatggatcgccatgcggatttcattaatcgctttgatgcgatcatcttccggcaagctggcgagaaattgcgttaaatcctgcgttaatcgttgttgcatagtatcccccattcctgacgttttccttttatccgttcgttataacgctgatagttcttgctttttgtggggctaaaacttaatgcccgacaccagtaatcgttattgagtaaaactttgcatatccgccgccaggaggggatatctttcgcgccaatgtccccttgctgggtttgtggaacctcgatgccttttttctgataccagtgcaaataaatggcgattttattgcggtaatgctcagctgttttttccggcatgctattgagcagcaataatgcatattcttgccagtctaaatgttctggcttgaggattttccgatgcccatagaaatgattgtcatgtccggcgtaaatgccgccactttttaccccgctgactcgtgcgcacatagcagcccagcgatccggttcgataacgtgatagagccataatccttgtcgttgctccgggccaaaaggttcgcaaattcgcatatgacgcagaggaacgcctgcctgatacattaggttatacagtgggttgcagagactttgatgatttgcataccaggtccagatatcagccactttccagtcgtaaatggggtaaatgtaccagctatgaccgcctggtgcggccgtagtccagggtttatcgtcggcaaaacgttgtttatttaaactggcgatggcgacaaaacggttgtaggactcatccgcacggatgccgatcatcatcgccgccggacgtttttgactaaaccattcggcaaactcacgtacaaattgttcgaaggtcatgcctggctggtaaaagcagaaaaagtcagggtcggttatcgcatcttggggaggttgacgtacccattcgacatcaggttcccagcactgccattcgggttggtattgactaagggaattttgcgtcgtaagcgggagcgcaacccagtaaaactcttcgatgacatcggtgtacaactcgcgcagggactgaacatagttaatggtgcaagagaattgcgcctcccagtcgataaacaaaacgcagatttttttgcccatttgtcgggcaagttcggctgtcagatgcagcattaaaccagagtctttgccgccagaaaaactgacacaaacgcggggtagggtgttgagtgtccaggtaatacgctctcgtgcagcttccagaatattgagcggaagaggaattttataaatagacatctgaagacgctctctgaacgttacagggtgatcagtgagataagtctgttaattataaagtaaacactgtaaagcagagtgttttatttttcattcgcgctgtgaataaatagatgaaagttatagtagctgtctgtagttatatatcaaaaactctcatttagacggtcaataaatcgggagaacaccaaattatttaaagaagatttattataggaaatgtaaagctttatactaggtaacggatgttctagttttatctcttttaagttaagaaagtcacggtaggaattataaagttcataggggactattcccagtaaatctgtaactgcaatgctattaatgattgtcagcaaagaggaaccacgaaaactgattttgcgattcataaatctctcgtctatttccatttgaatatcatcaacccctgcacttttagatattaattgggtgaactcttctgccataatttgttcataagtgctattgtcagtaattcgtggatgcctattactacaaattagagtattgcgaatcgtatgcaatggcatgcaaatgacggaacggctgatcactggcatttgggtgatcaccagatcggctttgcggtgaaccaacagttcttcagcattctctgcactcatgaggatatcatggcactcaatctcgacagaggaatcttgccgtaggcagcggatcagcatactattattagagcaagaaatgagctgagggccgtagataataaagtttttctttagttcggacttattgactatattaattgtttgttcaaggcctctgagatttttctcaagatggtgatgcagatttaaccctgttgtcgtcggcgcgataccttttccactgcgaatgaataaagggtcattaaattgcgcacgtaagcgttgtaagctctggctcacggcacttggggtgatatatagactttcagcagctttgctaatgcttaaatgctggtaaatacactcaaatatgacaagaagatttaagtcgaactttttcaagtcgtagagattggccatacactactccggttatatttttcttccatgatatattcacttaatcaatgttttttgcgtatatatttttattgattatgtttttttgcttaactcaggattaagtttttctaaaatagcacagccacttagggcagagcgagcaattcatgcttttttaggatggttgaaaagcagggatatagttcaaccatccatgaattaccttttatttattccccataatgatattaagcgttttctgatcgggcaaccccacggcctgttgtagcgtattttccttactcatgtaatagatagccggcgtgacatttgcccccagatcgtccatcagtttctcattgtcacttaacactttcatttgctctgtacttacgtttgcaggcacgtttagcttaagcttgccaccagaggcttcatattgttgccaggtttttgcgggatctttggaggcaagaattgccgctgctgtcgccgggctttctggcttgataaccccaaccaacaatgttcttaattgcactttgccagaatctacccacgggcgcgcctgctgccagaactgtttacaatatgggcagaacggatcggcgaagacgtagacaatgaccggcgcatcttttttaccgtcgaggagccagtgggattgttccatccgttgccacatttcgcgtccggctggtgcgtaaatttctttttcgataagtgtgttactcaggttttcacctttctcgttgtacatgtaaccagagatagcgtgcttaccatctggagtcaggtagatggtgacgcccatatcctgacactttccgagataacctttcattcctccgggggcatcgaatgttttgatgattgtaatgccctgtttttcaatcgcttttactggagcaggaagttcctctgcgaaggcgattgcaggaagcagagccagtaaaagtatcttttttaacattaatttgtccttttcagtcagtgcaaaagtcgagtaaaaggcataacctatcactgtcataggtaagagcttagatcaggtgattgccctttgtttatgagggtgttgtaatccatgtcgttgttgcatttgtaagggcaacacctcagcctgcaggcaggcactgaagataccaaagggtagttcagattacacggtcacctggaaagggggccattttactttttatcgccgctggcggtgcaaagttcacaaagttgtcttacgaaggttgtaaggtaaaacttatcgatttgataatggaaacgcattagccgaatcggcaaaaattggttaccttacatctcatcgaaaacacggaggaagtatagatgtccttgattaacaccaaaattaaaccttttaaaaaccaggcattcaaaaacggcgaattcatcgaaatcaccgaaaaagataccgaaggccgctggagcgtcttcttcttctacccggctgactttactttcgtatgcccgaccgaactgggtgacgttgctgaccactacgaagaactgcagaaactgggcgtagacgtatacgcagtatctaccgatactcacttcacccacaaagcatggcacagcagctctgaaaccatcgctaaaatcaaatatgcgatgatcggcgacccgactggcgccctgacccgtaacttcgacaacatgcgtgaagatgaaggtctggctgaccgtgcgaccttcgttgttgacccgcagggtatcatccaggcaatcgaagttaccgctgaaggcattggccgtgacgcgtctgacctgctgcgtaaaatcaaagcagcacagtacgtagcttctcacccaggtgaagtttgcccggctaaatggaaagaaggtgaagcaactctggctccgtctctggacctggttggtaaaatctaaatttccttcgtctttcacgccatagcggcgttggcgtcgcccgctcaccccggtcacttacttgtgtaagctcccggggattcacaggctagccgccttgctctgacgcgaaatacttcggaaattcacctaattcttcgggtgctgcggcacccgattttcttccccgcaccatgatgcaagctgcatccaggtagccgcagaggccgcttgcatgatgatgtttaaagcccaggagataaacatgctcgacacaaatatgaaaactcaactcaaggcttaccttgagaaattgaccaagcctgttgagttaattgccacgctggatgacagcgctaaaagcgcagaaatcaaggaactgttggctgaaatcgcagaactgagtgacaaagtcacctttaaagaagataacagcttgccggtgcgtaagccgtctttcctgatcaccaacccaggttccaaccaggggccacgttttgcaggctccccgctgggccacgagttcaccagcctggtactggcgttgctgtggaccggtggtcatccgagcaaagaagcgcagtctctgctggagcagattcgccatattgacggtgattttgaattcgaaacctattacagcctctcttgccacaactgcccggacgtggtgcaggcgctgaacctgatgagcgtactgaacccgcgcatcaagcacactgcaattgacggcggcaccttccagaacgaaatcaccgatcgcaacgtgatgggcgttccggcagtgttcgtaaacgggaaagagtttggtcagggccgcatgacgttgactgaaatcgttgccaaaattgatactggcgcggaaaaacgtgcggcagaagagctgaacaagcgtgatgcttatgacgtattaatcgtcggttccggcccggcgggtgcagcggcagcaatttactccgcacgtaaaggcatccgtaccggtctgatgggcgaacgttttggtggtcagatcctcgataccgttgatatcgaaaactacatttctgtaccgaagactgaagggcagaagctggcaggcgcactgaaagttcacgttgatgaatacgacgttgatgtgatcgacagccagagcgccagcaaactgatcccagcagcagttgaaggtggtctgcatcagattgaaacagcttctggcgcggtactgaaagcacgcagcattatcgtggcgaccggtgcaaaatggcgcaacatgaacgttccgggcgaagatcagtatcgcaccaaaggcgtgacctactgcccgcactgcgacggcccgctgtttaaaggtaaacgcgtagcggttatcggcggcggtaactccggcgtggaagcggcaattgacctggcgggtatcgttgagcacgtaacgctgctggaatttgcgccagaaatgaaagccgaccaggttctgcaggacaaactgcgcagcctgaaaaacgtcgacattattctgaatgcgcaaaccacggaagtgaaaggcgacggcagcaaagtcgttggtctggaatatcgagatcgtgtcagcggcgatattcacaacatcgaactggccggtattttcgtccagattggtctgctgccgaacaccaactggctcgaaggcgcagtcgaacgtaaccgcatgggcgagattatcattgatgcgaaatgcgaaaccaacgtgaaaggcgtgttcgcagcgggtgactgtacgacggttccgtacaagcagatcatcatcgccactggcgaaggtgccaaagcctctctgagtgcttttgactacctgattcgcaccaaaactgcataagaagaagtaagattcacctgcaattgcttagccgccggggtcaaacctggcggcttttttatggcattaaaaagccccgccgggatggctccgggcagggcgggatacttattctggcaattaacgcacaaccagcaccggcagattggcgtggcggatcacgctgctggcgttagaacctaacagatgggtgctaatgcttgggttgcgagaaccaataactacaacatcagcccccagttcttctgccaactcattgacttcatcccgcacgctaccaaaacggacatgttgtttaatgcgggaaggatcgatggtgaagtggctgaccatcgtttgcagacgttcttgtgcttcatgttgcagatgctcttcaaaacgacgcacatcagcggcaaaacggtgcaggctcaggctggcactcccgggtagtacgtgaagtagatgaataactccgtcatcctgggcgaggaattcagcgtggcgaacagctttgtcgctcaattccatttcaaatacatcaactggcataatgattgtcttatacataaccctttctccctgttaatcatgaacaaatcattcgccatgattataatatttatccctgatatttgtctggttctttttccttacgaactgtttctgtgatgaatatattctcactgaacaccaggaattctcccaaaacctgtggtaccgcccgttttcccgctgtgatagctacccttaaagactgactcttttttgaactgtctctggaggttgcatgaaagcattgacttatcacggcccacatcacgttcaggtagaaaatgttcccgatccgggcgttgaacaggcagatgatattattctgcgtattacggcaacggcgatctgtggctctgacctccatctttatcgaggcaaaatacctcaggttaaacatggcgatatttttggtcatgaatttatgggggaagtagttgaaaccggaaaggacgtaaaaaatttgcaaaaaggcgaccgagtggtaattccgttcgtcattgcttgtggcgactgttttttctgtcgattgcaacaatatgccgcctgcgaaaataccaatgcgggtaaaggcgctgcgctcaataaaaaacagataccagctccagcggcattgtttggttatagtcacctgtatggcggcgttcctggtgggcaggcggaatatgtccgcgtccctaaagggaatgtggggccgtttaaagtaccgcctttgcttagtgatgataaagcgcttttcctttctgatattctgccaacggcatggcaggcagcaaaaaatgcgcagatccaacaaggtagtagcgttgcagtctatggtgctggtcctgtgggattgttgacaatcgcctgtgcacggttgctcggtgcggaacagatttttgttgttgatcatcatccctaccgcttgcatttcgccgccgaccgctacggcgcgatcccgattaattttgatgaagacagcgatccggcacagagtattattgaacaaacggcaggtcaccggggcgtggatgcagtaatagacgccgtcggttttgaagcgaaaggcagcaccacggaaacggtgctgactaacctgaaactggagggcagcagcggtaaagcgttgcgtcagtgtattgcggcggtcaggcgtggcggcattgttagcgtaccgggcgtctacgctggatttattcacggtttcctgtttggcgacgcctttgataaagggttgagctttaaaatgggacagacccacgttcacgcatggctgggagaattattaccgttaattgagaaaggattactgaaaccagaagaaattgttacccactatatgccgtttgaagaggccgcccggggatatgagattttcgaaaaacgtgaagaggagtgccgtaaggtgattctggtacccggtgcacaaagcgcagaggcggcgcagaaggcggttagtggtctggtgaatgcgatgccggggggaacaatatgatcgtcaggagtggttttcgaggtaaaggacagccatgacgataatcgccgccataatcagaaatcctatcaggatgtaaaatgcttctgccatggttattcccacaaacgaaacggaataattttgcagcaaaagtgaacagtgagaaccaggaaaaattgctgattttgcgtaaagaggatgcgagtgcatcctctgggcaaagcgagttatcgcttgtgcagatgggattaaagcaggtagtcgccagcagcttctggctggtattcgagttccagcacttcaaggtgggttgcaacgccgcccggaagttcccagtgaatggaatcgccaacgcgcagccccagcagtgcggcacctaccggagccataacggaaagctgagtattgctatcggtcatttttgccggatacaccagcgtgcgcacacgcacttcgccatcgctaagattgcggaatttaacccggctgttcattgtcaccacgtcgtgtggcatctcttctgggctacacatttgggcgcgatccaactctgcgtttaacgcgtcggcgattggcaaaccagcataggcgggttgctccagcagaatatcgatgcgttcggcatccaggtcgttaatgatgatagttggtctggacatttttactccatgtcgtcggtgctgcgagtgtcgcagataaacatacccaaaagaaaaccctcaccgtcaggcggcgagggtttaactcacatgatgatactgactgttgctcactctttgaagtgatttgcgtcacattcagggaattcctcaatgcagcgcattatgtataaatcttaatcgccttggtttatggaagacgaattagcgtgttttgtaaatcagatgattaataacccgctttatcaatcacaaaggttttgccacagttacctgggtgaggttgtggcaagaaactgtttgcagaaagcggagcgttgatggcgtcagctttgatgctgatctgaatttcagtcaaatacgcagggttaccctggcacgttagcttaactgctttcacgttctcttttccccagcttttggcaaaggcggcgtcaaagtcacggcggctcactgttttaccgtaattatccgcaaggaattttccggcttcgctctctttaatttcttgattcaggcgtaccatcgtaccgaagtatgcgtccggatcaaaaccaaagcaggcaccgtgtttggcatattcgtagcgttccaggcaggaacgtccgccagctcctggcatgacttcacttagtttagcggccgtttccagacttaatccggtttccgggctactacacattcggctggcgcgcgcttctggtagattcgggattgggcgagtagcgcaaccgaagcgcatccagcggcgttcatcaacaccacgggcagcaacgcttttaggcaatcctggccacagaccatgtacggtcagaaaatcagctttgttggtcgtttcggtttgcaggcgacattcatctcgttcgttacgatttcgatcgtgttgactctggcaaaatccggtttgccaggagagggccaggacatagcgatcaaaatcgccatactgttttgcctgcaacgctaaggcgttggcagaagagaagggaagcagagaaaccgcgagcaacgcggcgttacgccagaatgctttcataatgggtgtggaactcatacatacactgaatactatctattaaatcataaaaaagcccgccaggtgggcttacctggcgggcgtgatgatttattcagcgtttggcgaacgtattagttccacatggcgagaatcggccagccaaccaacagcaacatagagatgtaaatcaccccgaagattgcgccaagacgccagtaatctttacttttcacatagccacagccgtaaataatcaccccaggaccggttgcatacggcgtcagacagcccatgataccgatagacagcaccagcaggatacacagttgttccattggtacgcccggaatacctttaccgacggccagaataaccggcagcatggttgcggtgtgcgcagacaggctggcaaacaggtagtgtgcaaagtagaacaccagaaccagtacaatcaccgttgcgtttggactgaatccttccaggtgcgtactcatggtaccggcgaaccagtcaataaaaccagaacgagtcaggccgttagccatcacaaccagagttgccaggttgaccagtgtgttccatgcgctgttatagcgggtaatgtctttccaaggcacaacgtgcagggccagcattaggctaactgccagcagaccaaccgcagtagcattaatgacttcactgccaaatacccacaaacctaagctgagcaatacaaggccaatcagtgtccactctctgcgtgtcagcgcacccatggttttcagttcatcacccgcccaggttgccacttcttcactgtgtgtgatttccggtttgtacagcacgtaggaaagccacggcgcaatgataagcaagataaccccaaccggcaggaagcagaggaaccactgcaaccagctaatctggataccggcaattttgctgacgaactccagacccagcacgtttggtgccgcaccggtgacaaacatggagctactcagactggtactaatgaccatcatccacatcaaatagccgccaatacgacgcgcggacggatcgttcgggaaacttttaaacaacggcggcaggtttttaatgaccggaaaaaccgtacccccggtacgcgcggtgttggaaggtgtaaacggtgccagcagaatgtcgataatgacaatcgcataacccaacgtcagcgtgcgtttgcccatgaatttcaccaggaaaagggcaatgcgacgacctaacccggaaacttcataccctaatgcaaaaataaatgcgccaaataccagccataccgtggtgctggaaaaaccagccaggccccatttcagcgcctgtttttgcgcattaaacgctgggtcagctaattctttggcatcaaagagcaggtaattactgccaataacgcaaatagtaaccgcaataaaactgatcgctgttgccggaattggctcgaggatcatgccgacaatcattgccacaaacacagcgaagtaatgccatgcctgcggcggcataccgtcggggacagggataagaaacatgacacccatcaccaccagtggggccaatagtttccatatattatcttttgctaaagacatacgggttctccgaaaattaatatttccaaatttatcaagtgcttaaataattaaatctgtgctaaaaaccaggtaaggatcagtaggtcagcactgccgcctggactgagatttcgttcgatacactccctgtcgaactgccggagataatcgagatcggcgggggttcgaatgccccctttttgcaataatgtttgcgcctcgcgctgtagccagcgcaggcccccctcgccaccgcggcttgcaacgttggtatcgccgttgatcgccatcagtaggagcaaggtatcgagcaatgccagttcaggatctaacccctgatccagcagagtgaggtaatgcggcaaggcgtgattgatcaccagtggataacccgcttcggcttcaccgcgtgcgccggtaaggccaagctgttggtacaaccgttgacctgccgtcagttgactattattggtacgcagttcgcgatcggtcaggccacggcagaaacttgccgccgtagaacaaacggttgttggcgttaccggttggttgagttgaagcaaacggccaattgccgcacatagcagccctaaagaaaaaatgctgcctttatgcgtgtttacgcccgcagtggcgcggaacatatcaccttcgcaagccataccaattgggcgtaatccgtggagtaccgcttctggtgccatttccgcactacaggcaccaaattcaatgaaacggggtagccagccctgaatcgccagcgcgctgcggtggaaatcttccagcgccatatctttgtgcgcaccgcagttaatgcgatccacgaggcctggtttcggactcagattgacttcagtcagcatggcgcgccagcccagcagggcgtactcatcgattaaactcgtcgcaagctttgtggttttagtactcgttgcaggcatgctcatcgttcagcagtgcctccatgttatttagttgacgttgcaggcatcgacatcgttcagcagtgcctccatgcggttgagtaaatcggtcagttgatgggtttttccacgcgcgcagacggctgcgctttgttcgcacaacaggcagcggcgaggcggcagactatagtcgcggcgggagagaatttcgccttcgggcgtcaggacatcgatatcccataaccgcccgagaggatgactatgttcaagctcaatggtggcgagcttgaggtcgcgagccggggcggcaatgctcaacatgccctccggcccgctggcggaaaccagtgcagcctgctcctgaatttgccagccctgttttgcggctaaggcacgcaaggctgtcacgccatgattaaaaattcggcgtgtgacctcgctgtctttaatcggcccaggcgcaaccacggtaaaggagaccagtggaacaggatggcgcttgagccagacgtgttgccgtgcttgcctttcatcccggctgacgagcagctcgggaatacttaccgcatggtggctggcgagttcaggaagcaggtgcatggcttattccttcacctgatgcacaacatcgatcacgctgccatcgcggtaacgcacaacggcaacgacgcggtctgtgaattcaatcggctgtggttcaccggtcagcagacgcgcacgttcgcgcagccactcaatggaaaccactttaatgcccgcttcctgcagacgttctgccagttccggacgtgccgggttaactgcgataccgtggtctgtgaccagaatatcgacactggagcctggggtgatgcaggtcagtacgttatccaccagagtcggaatacgaccgcgtaccagcggcgcgacgatgatggaaagcgcagaggcaatcgcggtatcgcagtgaccaccggaagcaccacgcagtacgccgtcagagccggtcagcacgttaacgttgaactgggtgtcaatttccagcgcgctcagtaccaccacgtcgagacgatcaacgcttgcgcctttgctaccccagttagcgtactggttggcgctgatttcgatgtgattggggttacgggccaggctttgcgcagcatggctgtcaaagctctgcacatccagcagtttgcggatcagacctttttcgtgcaggtcaaccatcgtcgcggtaataccgccaagggcgaagtcggcgcgaatatcgcggctacgcattttgtcttccaggaaacgggttaccgccaggcttgcgccgccggtgccggtttgcatggagaaaccttctttgaagtagccagagttgacaatcacatccgcagcgctacgggcaataagcagttcgcgcgggttagtggtcatacgggtcgcgccagcgccgatttttgcagcatcgccaacgcggtcaactttgacgatcaaatcaacctgatcttgctcaatgcttgccggattatgcggataaggcagcagttcttcggtaagcatcacgacctgttttgcgttgtcggcatcaactattgcatagccgagggagccgcagcaggctttaccggtgtagccgttggcattaccgaattcatcacaggacgggacgccgaggaaagccacgtcgatattcagttcgccgctctgtaccagatgcacacgaccgccgtgagagtggatctgcaccggttctgccagcagaccacgggagatctcttccgccagtggaccacgcaggccggaggtataaatgcgggtaaccacgccctggcgaatgtgttctaccagcggcgcatggcaatcactcagggagctggacgccagggtcaggtttttaaagcccatcttcgcgatgacgtccatcaccatattgacggtcaggtcaccgccacggaaagcgtgatggaaggaaaccgtcatgccgtcctgtaaaccagagcgacgaatcgcttcttccaggttggcgcacagtttgcgatcgcgcgctttttcagcctggtaggtttgctttgggctgttctggaaagcggcaagatcgcattcagcgcgacgattccaggccgctacccgttcttgtcgttgagattgttcaattttctgcgtcattttgattgccttattcttcgcggatgccggaaagttctgcacgggagagcaccagacgggcgcgatcgataaccggaccgtccaccatcttgccgttcagggaaaccacgccgaggccttcgcgagcggcggcttcagcggcttctacgacgcggcgggcgtgatccacttctttctgggtcggtgcgtagaggttgtgcagcagatcaatctgacgcgggttgatcaggcttttgccgtcaaagcccagctgtttgatgtgggcggcttcttgcagaaatccggcttcgttgttagcgtcggaatagacggtatcgaacgcctgaatacccgcagagcgcgcggcctgcaaaatggaacagcgtgcgaacagcagttcagttccttccggggagcgttctgtacgcaggttgcgcacatagtcttctgcaccgagggcgataccgatcaaacgctcggaagcgtgagcgatttccactgcgcgggtaatccccagcggagattcaatcgccgccagcaggccggtgctgccgggttcacgaccacaggctttttcgatacgcaggatctctttttcaatatccagaacatcctgagcggtatcggttttcggcagacgcacaacgtccgcaccaccgcgaacgacggcttccaggtcgttaacaccccattcggaatccagcgcgttgacacgcacaatggtttcaatatcgcgatacagcggatgttgcagcgcgtggtaaaccatgcggcgggcggtgtctttttcacgcaatgctacggagtcttcgaggtcaaacatcagggcatcagccgggtagatgaaggagttgctgaccatcgcggcattggcaccaggcacaaacaacatgctgcggcgggtgcgagttttacgttgttgcaggctagcggaaatcattggcaatcctcccatggcagagccgggataccgctggcgcgtgccagcagggcttccagtcgtgcacgtaaaatgcagtacagtgcgcctttgtcatcgacattcagctgtacgccgcgcacgttgtagcgggcgagaacgtccagaatggtggtgcgaattgcatcgccaaactgtttctcaacgctgctattgatttgcaggtcgatatcctgcgtatcgagtggggcgatgcgtatcatcacatccccagactcaagggtgcctgcaacggcgggctggtttattttcatttttcacctgtttctcatgcgggggtcttttgacgagctgccgcgtcctggcgggagtgctcaagcaggttctgcaaataatgcagcgtgactgcagggaccagcggcgcgatagccgtgagatcgtttttcgccagcagttgacgtacccgggaagcggatatcggcatctcctggtaacgcagccgctcaatttcaaccagttcgatgggcggtgcggagatagtcggcgtttccagccagtagcgcatatcctggttgtactgggcggtaacgcgacaaaagggttcagtaccgacaaagcggtgagttacacccagcgcgggagcgaggtactgacggaaaatcttcagatcaatttcggtgtaacaatggttaatgacgctctgttctttaatgaagtagcaagggaacgtagcgcgggagatgatgtattcggagccacgatgcacagtcaggcgtggaatatcggcggtgccttttaacaccaaatccagccggtcttcataggggaagcgactagaatcttctttgactaaaaacagatgcaaccagtcgcactgtgccgcagcctgttgaatcagataacggtgaccattcgtaaagggattggcgttcatcacaatgcagccaatcttgttccctggatgacgaaattttttcaggctttcggcatagcgtttcagtcgcgtggcgctgttttccatcagcaccatcacgccgggtacgctggtcagcgtggaaaaaccgcactggcggaacagcgcctcgtattcggttttggtataaataaacagatgcgtgctgtgccgctcataggcgaggtttatcaattcagtggctaatgtcagcgccagtccttcaccgcggacggattcactgatagcaacgcatttaataatatttccggcaattccaccgcacgcgataagcttttcatcgcgggttacggtaataaatacttcgactgtggtgtcaacgctcaaatcattttcatgcaggaattgggcgatttccgccatttttttattttcactacgttttacgcgggtgaaaatatcattgccgaacataataaatagtatcctgaaggtgcatgttgttatcgatttgcaacgaatgttgttcaatgttgcaaactgataaccttttattttcacttgggagaaagggggtgatcgaggtatatctttttctcctttcgctatacatcctaaggagtatttcggcgtgaaattttgatttatttcacatagagttagtggttttttatttatttaatgattttaagttttttaattaatgtaattacgaaatgactcgcaggtttaagtgatttaattgatttaatgaataaaatttgccacgatcataattaatatctatgtattttgattcaacattttaattacatccgtcaaagaggctcgggacaacccgcaaggaaaacaatgttgcagcttaacgagaataaacagtttgcatttttccaaagactggcatttccgctgcgtatctttttgctgattctggtgttcagtatatttgtcattgcagccctggcgcaatattttacggccagttttgaggactatttaacgcttcatgtacgcgacatggcaatgaatcaggcgaaaattattgcctccaatgacagtgtcatctctgcggtgaaaacgcgtgactacaaacggctggcgaccatcgctaacaaattacaaagagataccgattttgattatgtggtgattggggaccggcacagcatccgcctttaccatcctaatccggagaaaattggttatcctatgcagttcaccaaacagggcgcgctggagaaaggggagagctacttcattaccgggaaagggagtatggggatggcgatgcgcgccaaaacgccaatctttgatgacgatggaaaagtcatcggcgtggtgagcattggctacctggtgagtaaaatcgatagctggcgggctgagtttttattaccgatggcaggtgtgtttgtcgtgctgttagggattctgatgttgctgagctggttcctggccgcgcatatccgtcggcagatgatgggcatggagccaaagcaaatcgcacgcgtggtccgtcagcaagaggcgctgtttagtagcgtttatgaagggctgattgcggtggatccgcatggttacattaccgccatcaatcgtaacgcaagaaagatgctggggctgagttcccccggacggcaatggttgggtaaacccattgttgaagtggtcaggcccgccgatttctttaccgaacagattgatgaaaaacgtcaggatgtggtggcgaactttaacggtctgagcgttattgccaaccgggaagctattcgtagtggtgatgatttgctgggggccattatcagctttcgtagtaaagacgaaatttccaccctcaatgcgcaactgacgcaaataaaacaatacgttgagagccttcgtacattgcgacacgagcatctcaattggatgagcacgctcaatggtctgttgcagatgaaagagtatgatcgcgtgctggcgatggtgcagggggagtctcaggcccagcaacagcttattgacagcctgcgcgaggcgtttgccgatcgccaggtggcggggctgctttttggtaaagtgcagcgcgcccgggaactggggctaaaaatgatcattgtccccggtagccagcttagccaactgccgccaggactggatagcaccgagtttgcagccattgtgggcaatttacttgataacgccttcgaagccagcctgcgtagcgatgaaggaaacaagatcgttgaattattcctcagcgatgaaggcgatgatgtggtgattgaagtcgccgatcagggctgcggcgttccagagtctctacgagacaaaatatttgagcagggggtcagtacgcgtgctgacgagcccggtgaacatggcattgggttgtacttgattgccagctacgtaacgcgctgcggtggtgttatcactctcgaagataatgatccctgcggtaccttatttagtatctatattccgaaagtgaaacctaatgacagctccattaaccctattgatcgttgaggacgaaacgccgctggcagagatgcatgcggaatatattcgtcacattcccggattcagtcagatattactggcgggaaatctggcgcaggcccgaatgatgatcgagcgttttaagccggggctaatcttgctcgataactatcttcctgacggtagagggattaatttactgcatgaactggtgcaggcgcattatcccggcgacgtggtgtttaccactgcagccagcgatatggaaacggtgtctgaagccgtacgttgtggtgtatttgattatctcattaagcccattgcctatgaacggctggggcaaacgctaacccgtttccgccagcgtaaacatatgctggaaagtattgatagcgccagccagaagcaaattgatgagatgtttaatgcttatgctcgcggtgaacctaaggacgagctaccgaccggcattgaccccttgacgctaaacgcggtgcgaaaactgtttaaagagcctggtgtgcaacatacggcagaaacggtggcgcaggcactgaccatcagccgcaccactgccaggcgttatcttgaatattgcgccagccgccatctgattattgctgaaattgttcacggcaaagttggcagaccacaacgcatataccacagtgggtgacatgataaagccggaggaaacttgcctccggcattactatttacttgcctgtgaccgctgctgccgttcctggcaccatcagctctgtagcaacgataacaatcaccaaaccaacaagcaccggtacgctggtgcgttttacgacttcaaacgggctgatcttcgccatcccggcaaccgcaacgactacgccagaaacggggctaagggtacggccaaggttactcgcctgcagcatcgggatagtcaaatacgccgggttaatgccggaagagtgcgccagtttcgggatcatctcaacaaacgcataaaacggcgcattgccactaccggtcgtgactgccgccagcattgtcagaatcaccaataccagcatcaggatgatactcgcgctaccaaagctggtagcgatagaaatcagactttgaataaagccgatggtgctaagcccctgagcgaataccccagcggcaaccagcagcatcaccacgttagcaaacgcatctgccatcccgcgataagccacttccagaccagagaaaactttctgggtattaaagctgcggaggaactccagaatggaggcaatcagcatacaaatcaccagaatagtgatgatgtgtaattgcggaccccatttaccgtcaaaaatcagtacaccgatgatcggcgtgaacggcaaaatggcataaaacgcaggagcagtggtggtgatttcactgacatctaacatttcatgagagatgtgctcttttttatccagataacgttgccagaagaagtgggcgatcgccatgccgataattgcagcaatactgataggcagcgtcgttttgaaggcgaagtcaatcaggctcatttcggaagcttgcgccgccagcaccacatccccactagtcggtgcgagaataatcgccgccggggaggcacaaatggcagcagctgcgccacgactgataccaacgtttaccatcaccggaaatagggttgccatcagcaaaacacccagaccggttgcggaagagacggccagagacatcagacaggcgacaaaataggcggcaatcatcagcaggtaaggggagttaatatactgcaatggtttactcgccagcttgaccaccatatcattcgcgccgatatgggtcatgtaagcggcaaatccacacagcatcataatcatcatgccgaggtcgccgccgcggctcattagtaatattttaacgtattcaacgatatccgtggcgctgtagcctgtactagcctggctggacggtaacactttgtgccccataatggcactgataatcagcaataacaggccaccgacaaataacacaccagtggcggaataccctttaatgatgtagcgagctacacccacaataaccacaaccccaataaggagctcaatgaatgtcagcataatttttcctgtctccaggccccaaagtaaataataaaaaattcctaaagcttaaggaaaaaatatgcccaataaattggcgatgaatgctgattaaaatcaagaaaaactgccattaagacattgaagttgctgtttttatacatagataacaaaacgcatatttagcggttggcaattatcacataataatgtgtgcaaattgatggtggattgatgcaaatttgttaattgcaatggtgttagctgcggctgtgcgctcaaaaaataatctaatatgagcataggttgacgatatatattatatacttcgttaagatgattgttgtatctcgttaaaaaataaaataatttttccttgattgcattttgtcatcaaaaaagacttggtttttcttttttgactattcccatcgcagaaaacgacgcatcatctttaatcgatgcgcggaaatatttaacttgaacaagcggaaataaatagagcagctattcagattattctttatgttgggtctattaaggttatgttaattgtagctttgctatgctagtagtagatttttgataaatgttttatggtcacaaatgaacgtgagtaaatatgtcgctatcttttcctttgtttttattcagttaatcagcgttggtaaagtttttgctaacgcagatgagtggatgacaacgtttagagaaaatattgcacaaacctggcaacagcctgaacattatgatttatatattcctgccatcacctggcatgcacgtttcgcttacgacaaagaaaaaaccgatcgctataacgagcgaccgtggggtggcggttttggcctgagccgttgggatgaaaaaggaaactggcatggcctgtatgccatggcatttaaggacagctggaacaaatgggaaccgattgccggatacggatgggaaagtacctggcgaccgctggcggatgaaaattttcatttaggtctgggattcaccgctggcgtaacggcacgcgataactggaattacatccctctcccggttctactgccattggcctccgtgggttatggcccagtgacttttcagatgacctacattccgggtacctacaacaatggcaatgtgtactttgcctggatgcgctttcagttttgagacaaatgaagttttagtaacttctttaaaatcaatagctaaaataagtaacatcaaaaataacgcgacttttatcactttttagtaaagttacactggacaaagcgtaccacaattggtgtactggtaaccgacacagcatttgtgtctatttttcatgtaaaggtaattttgatgtctaagattaaaggtaacgttaagtggtttaatgagtccaaaggattcggtttcattactccggaagacggcagcaaagacgtgttcgtacacttctctgcaatccagactaatggttttaaaactcttgctgaaggtcagcgcgtagagttcgaaatcactaacggtgccaaaggcccttctgctgcaaacgtaatcgctctgtaagatacgtcagcaagaattcaaaacccgcttaatcagcgggttttttttggtctttagtgtgcggtactggcgctaaacagccagaatgccagtgcggtcatggcaaaagaccccagaaggttgacgaaaacgttcagtaatgcccagccaaagcggccctcttgtaacaaaaacaccacttctgcgctaaatgtactgaaggttgttagaccgccacaaaatccggtggtgattaatactttccacactggatcaatgttcgtcatcctgctgaaccatgcgaatcctattcctatgatgaatgccccaatcaggtttgctgtcagcgtccccaacggaatcgcctgatgcagtgggttaaatcgcatacttaacagccatctcgccacgcttcccgtaccaccgccaataaaaactgctaaaagaagttgtaacactgcaaaatcctgctatttgatttgtatgagtgataagtgtaacgccgaataatcgtcgttggcgaattttacgactctgacaggaggtggcaatgctggttgccgcaggacagtttgctgttacatctgtgtgggaaaagaacgctgagatttgtgccagcttgatggcgcaggcggcggaaaacgacgcaagcctgtttgccctgccggaagcattgctggcgcgcgatgatcatgatgcagatctaagcgttaaaagtgcacagctgctggaaggcgaattcctcggactttacggcgagaaagtaaacgtaacatgatgacgacaattctgacgattcatgttcctagtacgccggggcgcgcatggaatatgctggtggcacttcaggcaggaaacatcgtcgcccgttatgccaaactgcatctctatgatgcatttgccattcaggaaagtcgccgtgttgatgctggtaatgaaatcgctccgttactggaggtggaagggatgaaggtcggtctgatgacctgttatgacttacgctttccagagctggcgctggcacaggcattacagggagctgaaatcctggtacttcctgccgcctgggttcgcgggccgctcaaagagcatcactggagtacgttgcttgccgctcgtgcgctggataccacctgttatatggtggcggcgggggagtgcgggaacaaaaatatcggtcaaagccggattatagatccctttggcgtcaccattgcggcagcgagtgaaatgcctgcactcattatggcggaagtgacgcccgaacgtgtgcgtcaggtgcgcgcgcaactgcccgtcttaaacaaccgtcgctttgcgccgccgcaattattatgatgtttttttactcggcgcttgattcaccttgttacagattgctattgtgtgcgcgcgtcgaatgaccgttaatattctctggtttttaaggcgcgttctgttgccggttatatgtcaagaaggtatctatgggtgagattagtattaccaaactgctggtagttgcggcgctggtcgttctgctgtttgggactaagaagttacgtacgctgggcggagaccttggagcggccattaaagggttcaagaaggcgatgaatgatgacgatgctgcggcgaaaaaaggcgcagacgttgatcttcaggctgaaaagctctctcataaagagtgacgtggcgagcaggacgctccctcaatatcttgttcgatacaaaaaacccgcttcaaaaagcgggttttttatcagacagatgtaagtaattattacaggattacttaacttccatccctttcgcctgcaaatcggcgtggtaagaagagcggacaaacggaccgcatgcagcatgggtaaagcccatcgccagcgcttcggctttcatttcgtcgaactcatccgggctaacgtaacgttgaaccggcaggtgatggcggcttggctgcaaatattgccccagcgttaacatcgtcacaccatgacggcgcaggtcgcgcattacctcaataatttcttcattggtttcacccagtcccaccatcagaccagacttggtcgggatttccggatgcgcttctttaaagcgttccagcagcttcaggctccagttgtaatctgcaccaggccgtacctgacggtaaatacgcggtacgttttccaggttatggttgaacacatctggtggcgttgcagtcagaatatccagagcacgatccatacgaccgcggaaatccggcaccagagtttcaattttgatttgcgggcttttttcccgaatggcagtaatgcaatccgcaaagtgctgggcaccgccatcgcgcaggtcatcacggtcaacggaggtgataaccacataacgcagcgccatatcggcaatggtctgcgccagtttcactggttcattggcatcaggagctaccgggcgaccgtgggcaacatcacagaacggacaacggcgggtacaaatagcgccgaggatcataaacgttgctgtgccgtggttgaagcattccgccaggttagggcaggaggcttcctcgcagacagaatgcaggccatttttgcgcattgcggctttgatgccctggatacgtgtagagtccgctggaagcttgattttcatccattccggcttgcgcagcagggcttcgcgctctgttgccacgtttttaaccgggataagggccatcttatcggcatcgcggtatttaacaccgcgttccatcacaatgggtttactcatagcgtgcgtgttccagttgcgaattacgaaggaaagcgtttcaattcaatagattgttgtaattatcaactatttttgaattaacgactggcagtatatcattgaaacggacctgaaagcagccaaagcggtcgcgaaaatgtaaaattgttgttggattgtgccattttatcgttctgcgctgtgatctggctgtaacaatactttttcaaaatgcattacggataacatctattactccgtgcaggatgggatcacgcaggctgaatttgttgtagtggatagagaaatctatttgctcctcatttaaggacggaaaaggcagtttttccagcggccagcagcggctaaacaggttataaaaacggctgggaataatcgctaacatgtcactgttggcaaccagtgcagcgattgtcaaaatgttgtagctggtgaaattgatttgccggtccggaaacatttcttgaactctctgccgcagaccgctgaaattttgctcttccggtaacagaagtacatgcgcagcgttgtcgatagtctctctgtcatcttctaaagagagtagtggatttccctcgcggcaaattaacaccatattgtcggtgaacagaacatgatgttgcaccgtacgattggtgcaaaacatgttatcgatgatgagatcggtttgaaactgactgagttggttttccgcgtcgctgatgggcgggttgcgcagtaaaagctgcggatagtgagttttaatcgcccgatagatgacaggaaggaccagtgctccgacgctgggagtggtcgcaatagttatcgttcgttgcttatcatagcttccttcgatatccagcgcgccaagaatggactcaaggccctgactgatatactcatgtagatgcatcgcaaatgcggtaggagtgacaccctggcctttgcgaataaacaatgggtcagggaatataacgcgcagtttctgaatagactgactgattgcgctgggggtcagattaagcactttcgctgcattaacgatccctttatgtacatatacagcttcaaaaatagtcagaaggttaagatcaatatttcgtaaggttgtaaatatttgtggtttaccttcactgctctttctgcttaaacagggttcaatttgattattactatccacgcacttactccaattttattcatggaaaaataatatttaaaaaattacaataatcttatgtctaattggaacggaacgcttttgctcaccataatcaactatttcaataggttaatcaatggggtgagttacggagcaaggcgtggcaccgcatttctgcaagtgataaagaaaatatacaaacgcgaaggagatgtaaagcattagcagatattatgagtaatgacccagtgtaaattgggccattgatgtatggaattaagcggtaatatattcgaagtccggattgtttagtagcgctaaaatattttccagtaaacgtggagcaatattattagtcgtcgcttcgggtttccattgacttattttagccatttccattccggcatacccacaaggattaatacgtaaaaatggactaagatccatattgacgtttaatgccagaccgtggaaactacaaccgcgtcgaatacgtaaacccagactgcaaattttcttttccccaacatagacacctggcgcgtcagcccgaggatgcgcttctatacccagttcagccagggtattcaccactgtttgctcaagcaaggtcaccagttcacgcacaccgagtttacggcgtttcaggttaagcaacacatacatcacctgttgccccggcccgtgataagtcacctgcccaccgcgatcgctctggatcaccggaatatcacccggcattaaaatgtgctccgcttttcctgcctgaccttgggtgaataccggatagtgctcgaccagccagatttcatcaagggtactatcatcgcgggtatcggtgaattcatgcatagcctgggagattggctcgtaaggctgaagaccgagctggcggacaagaattttatcctgatacaaaacggcatctccgtggagaatgagtaaaagtgggggaaaagtatatcacagcgaggagaggggagttacccgaccaggagccgggtaacggagaagcgagttacagaaccatgcggacaatatcgattttgcccagttcttcatacagtgtttcaacctgctcgatatgagtggcgttgatagtgatagatacgctgtggtagttgcctttgctgcttggttttaccgttggggtgtagtcacctggcgcatggcgctgtaccacttcaaccacctgatcaaccagctcaggtaacgcctgccccataactttgtaagtaaaaggagtagggaattcaagcagttcgttaagtttggttttcatgtcagctccggcgtaacgtaattaaatagcaactcccgccagaaggcgggagttttttactgatgcttagtatatggggacggaaattacactttcaagtgtttaatttttaaccaaaccagtgatggaacattaatttaatgtaatcaatgattttgccgaagaagttaccttccgggatttcttgcaacacaaccagcgggcgttgctcgatcgttttgccatcaagctggaagttgatagttccgacgacctgattcttttgcagcggcgcatgcaattcactgctgttcagcacatagctggctttcagatctttcatgcgaccacgcggaatggtcaggtacacgtctttatcaacccctaagctagcgcgatcagaatcaccaaaccaaaccggttcagaggcgaactctttacctactttcagtgggttaacggtttcaaagaaacggaagccccaggttagcagttttttactttcggcttcacggcctttaaaagtacgtccgcccattaccgcagaaatcaagcgcatctggccttcagtcgcagaagcaacaaggttgtaacctgctttgtcagtgtgtccggttttgatgccgtcgacattcaggctgttatcccataacaggccgttacggttcagctggcgaataccgttaaacgtaaattctttttctttatagatgctgtattcattcggtacgtcacggatcaatgcctggccgatcagcgccatatctcgcgcggagctgtactgaccatcagcatccagaccatgtaccgtctggaagtgggtatttttcaggcccagtgcgttaacgtagctgttcatcaagccaacaaaagcgtcctggctaccagcggcaaaatcggccatggcgacacaagcatcgttaccgctttgcaggttaataccgcggatcagctgagaaaccggaacctgcatgcccggtttgaggaacatcaggctagaacctttaaacaccgggttaccggtggcccatgcgtcgttgccgatagtgactaaatcagtttctttaaatttaccggctttcattgcctggccgataacgtaactggtcatcattttggtcaggctggcaggatcgcggcggacatctgcgttctgttcggcgagcactttgccggagttatagtcaatcaggatgtaggactccgcatcgatctgcggtacacccgggatcatagttttgatattcaggtcatcggcatgtgcagcagagataaaggctgtgcaaagagccgtggtgagcgccaggcgcttcatgatacgagcggaaaaaatggtattcatggtctgaactacgacatccgtgatggaattaaaaaagtgccctactatagcaaatgcactaccggcaggcatctgactttccgcgtgactttgttaacgtcatttacagaaattgacacatcagatgcctgctttacgttactgcgcggtagtaataaaactctgtaattgggcttcggtttgcaaacgttgctgcaaggtactggcttcggctttgctggcgaatgggccaagctggatccgccagaccgcgccattttgagttacgcgaccggggacgccgaacttctgtcccagttgctgttggtactgttgcgcacgagcctgatcgcttacggccccgacttgcaccataaagttgccgctggcgctttggctgacggcttgcggtgtcaccattgcagggctggttgcaggcgttgtgctcggagctgtaacaacgggctgtggcgcaggcgtcggttcgctgccttccagtacaccaggcgctaaggtcgttggtgcgccgaggaaaccgctactggttaccggcgcgccggtcggatcttcgctttttagcgtgctattactgaccggaagaatgtcaccctgcgggccagacacactacttgttcccgcgccaccgcttaaatcgggaggtgcaggcagggcgtaagtctgtttggcgactgtggtacaagccataccaggaccagaaaggctaccatcctgggcaacaataatcggatcgatacgaactttggtgttgttactcgtgttaagacggtcagctgccgcgcgagaaagactaataacgcggtcgttgccgtaagggccgcgatcattaatgcgcaccacgatcattcgcccgttagccaggttagtgattctggcgtagctggggatcggaagcgttggatgggctgccgtcagctgtgtcggatcgaatgcttcgccagaggccgtcaggttactgccgggttcggcatcatagattgccgccagtcccgcctggctaaatcgagacggatcctgcacgattttgtagcttttaccgtcgcgctggtaatcctgatttgccgtcgcgttcagtggttcgaaacgcgggtccgccccgctaatttcaactatagggccgttacataccgcaggctgcggtacacttaccgtctgttgctgaccatcatcgcttgtacatgccgcgagcattcctgccgcgatgcagatcccgagccactgcttacgcattgcgcacctcttacacgcttttgctcaacattttcctgtgggtgtggatactcattacaatcccgaacccagccatcagcacaattagcgcgcttcctccataactgaccagtgggagcggaacccctacaaccggcagaataccgcttaccataccaatatttacgaagacataaacgaataatatcagcattaagccgccagccatgacgcgaccaaaggtggtttgcgctctggcggctatccacagcccgcgcatgatcagcagaatgtagagagcgagcagaatcagaatgcccactaatcccagctcttccgccagtaccgcgaagataaagtcagtatggcgttcggggagaaattcaagctgactctgagtgccgtgcagccagcctttgccgcgtaatccgccggagccaatagcaattttagactgaataatgtgatagcccgcgccgagtgggtcactttccgggtccaggagcatcattacgcgctggcgctggtaatcatgcatcaggaagaaccacagaatcggaatgaacgccgctaccagcactactgcgacgccaatcagacgccagctaaggccagagaggaacagtacaaacagaccggaaagcgcaacgaggatacttgttcccaggtcaggctgtgcagccaccagcagcgtgggcataaatatcagcaccagcgcgatgccagtgttcttcaagcttggcgggcaaacgtcgcggttgataaagcgcgcaaccatcagtggtacggctattttggcaatttcgctcggctgaaaacgaacaataccgaggtccagccagcgttgagcacctttagagatggcaccgaaagcatctaccgccaccagcaaaataatacagatgatatagagatagggggcccagccttcataaacgcgtggaggaatttgcgccatcaccaccatgatgaccagacccatcgcgatttggccgattttacgctccatcatgccaatatcctgaccgctggcgctccagataaccagggcgctgtaaaccagcaatgccagtaagatcagcagcattgtgggatcgagatggactttatcccagaatgtttttttattcggattatccgtcatgattaatggtcctccgctgcggcaaccgctggattttccgcaggcagatcggtgttgttatcacccagcataatgtggtcgaggatctggcgcatcagtgtaccaaccgccggacccgcaccaccgttctccagaatcatggcgacagccacttgcggattgttgtatggcgcaaaggcggtcatcagtttgtggtcacgtaaacgctcggcaattttgtgcgcattataggtttcgttcgctttcagaccgaagacctgagcggtaccggatttcgccgcaattttgtacggtgcgctagcaaagtatttatgcgccgtaccgttagggcggttagcaacaccgtacataccgtctttcgccagctcccagtaaccggaatgaatatcgccgacgggcggttcatgcggctgtacccatggcacctgtttgccgtcttcggcggtgctcatcagcaaatgaggaaccttcacgataccgtcattaatcaggatcatcagtgccttactcatctggattggggtcgctgtccagtaaccctgaccgataccaaccggaatggtgtcaccctgataccacggttttttaaagcgtttctgtttccattcgcgggtaggcatgttgccggaacgttcttccgccaggtcgataccggtgtaatgaccataaccgaatttacccatccattcggagaggcgatcgatccccatatcgtaggccacctgatagaagaaggtatccgcagattcttccaggcttcttgtgacattcagacgcccgtggccccattttttccagtcacgataacgtttttcgctacctggcagttgccaccagcctgggtcaaacagcgtcgtattgcgcgtgatcaccccggcgctcaatgcgctaaccgccacatagggtttaactgtagacgcgggaggataaaccccctgtgtggcgcggttcaccagcggtgtattcggatcgttcaacaaggcggaataatctttgctggagataccgtcaacaaacaagtttgggtcataactaggcgtggaaaccagcgccagcaccccacctgtacgcggatcggtgactaccacagctgcgcggctacccgccagcagcgtttcaatatattgctggagtttgagatccagcgtcaggtaaatatcgtgtccggcttgcggtggtacttcttttaactggcgaataacacgcccacggttgttaacttcaacctcttcataaccggtctgaccgtgcagcacatcttcatagtaacgctcaatgcccagcttaccgatatcatgcgttgccgcatagttggccagtttgccgtcattattcaggcgttcgacgtctttatcgttgattttgctcacatagccgatgacgtgggtcaacgcgctaccgtaaggatagtaacgacgtttatagcctttaacttcgacacccggaaaacggtactgattgacggcaaagcgagctacttgtacttcggtcaggttagttttcaccggaatagaggtgaaacggtgactacgtgcgcgctcttttcggaatgcagcaatatcgtcatcggtcagatctaccacgctgcgcaaagcgtccagcgtttgctgcacgttatcgactttctccggcatcatttctatctggtagatagtgcggttgagggccagagggataccgttacgatcgtagataatgccgcggctgggcgcgataggcaccagcttaatgcggttttcattagagcgggtctggtagtcggtaaagcgaacaatttgcagattatacaggttggcgataagcacgccggtcagcagcaaaatccccaaaaaggcgaccagcgcccggcgcacaaacagcgcggactctgccgtatagtcgcgaaaagagttctgtagtttcatccgctgcgttttctactcaaagctcccttatcactcacggtgataaggatggttggtggtgatgctccacgcccggtacagactctctgcgaccagcacgcgaaccagcggatgggggagggtaagcgcgctcaggctccagctctgctcagccgccgctttacaggcagggctcaacccttcaggcccgccaatcagtagactgacgtcgcgaccatccagcttccagcgttccagctcagcggctaactgcggcgtatcccagggcttgcctggaatatcgagggtgacaatgcggtttttgcctgcggccgccaacatctgctcaccctctttgtcgagtatgcgcttgatgtccgcattcttgccgcgttttccggccggaatttcaatcagctcgaagggcatatctttcggaaaacgacgcaggtactcggtaaaaccggtttgtacccagtccggcattttcgttcccacggcgacaagttgcagcttcacgcattaactccagagtttttccagttcatacaggcgacggctctcttcctgcatgacatggacaatcacatcgcccaaatccacgacaatccagtcggcgctgttttcaccttctacgccgagcggtaacaggcccgctgcgcgagactcctgcacaacgtggtcagcaatggacataacatgacggctggacgtacccgtacagatgatcatgcagtcggtgatgctggatttgccctgaacgtctaaggcgatgatgtcctgacctttgaggtcatcaattttgtcgataacaaaatcctggagtgctttaccctgcaagttttccccctgggtgaatcaaatagataaaaatggtctgtcagtatacctgaaccagaggcgatttcgggacaattgtcgccgaatcggctttcgaaagtgggctatcatcccaccccgcgccgcagattgcatcgccatttttgtaaaacaatttctacaaagtcgtgtctggcggaaaaagtctggctgcggagaatatcagcctgcccgggtctgtcaatggtcgttgcggcttacccgtaaaaaaacagaaaagtcatgcattctcgaccccgatggcacggctattgaggacgcgtagcgtcgcgaatttttggttgatatcaatggcgctccaacacccctggtcaacgcgaaaatgccacatagcttcggcaggcatgccaattaaacgggcgattaacagactcagtacaccctgatggctgacgactaaaatattctgatagtgctgaaattcactaagccttgcgataaagcgttccacacgttggctaaatgcctgaaatccttcaccgttcgtggggattgcatgctgccagtcattgcaccacgcgctatagttttcggcatcttcttgcatgaggtcgcgatgatgtcgcatctcccagtcgccaaaaaacatttcgttgagttcaggtatgatttgcacggggagctggcggtcactgagaaccagtcgcgcggtatgctgtgcccgttccagttcactgcataaaaccagatcaaaggaaacaccatgtagcagcgtatgcagattttgcgcttgctcaataccgcgcgcggtcaggggggtgggcgcatgaccgctgtaaagaccatcgatattcgcttgcgtttcaccatgacgaattaaccacagtcgcatcatgccctccgtaacgacaggtatcagcgatacaagccttgttggttaatgtaagtcagtaccggttccggcaataaatcctcacaactttcaccgttttgcaaacgttcgcggatgatggtcgcgctgatgttaaaccacggcgtttcagccagataaattttaccggcaggctgaaggtgaagatcttccgggttatgtgtcaaatgatcttccagccattgctggtattgcggttgcgccatttcaagtgggtaacctggacgccgacagacgatcaaatgtgcattgtcgagtatcgtttcgtattcgtaccaggtcggaaaggtcagcagactatcctgaccaataataaacgccagcggcacgtccggtccttgttcctgccgccactctttcagtgtttgcgcagtgtaagagggggcattgcgctttagctcgcgttcatcaagagtaaataatggcttgtcggcaatcgccagttcaagcatgtgtttacgctgcacgctgttcgcttccggctggggacgatgcggaggaacattattagggatgattgtgacccgcgtcagaccaatcaaattcgccagcgtttccacgggttttagatgaccatagtgcaccggatcaaaggtgccgccaaacagagcctgtaaagatttcatatcaaccgtcgataaatacgtccgccaggggtttatggcacaacagaagagataacccttccagctctgcccacacactctgaccgtaatcttgtttgagggtgagttccgttcgtgtcaggagttgcacggcctgacgtaactgcgtctgacttaagcgatttaacgcctcgcccatcatgccccggcggttctgccatacccgatgcttatcaaacaacgcacgcagtggcgtatgggcagactggcgtttcaggttaaccagtaacaacagttcacgttgtaatgtgcgcaacaaaataaccggttcgctgccttccagacgcagttgctgaagaatatgcaatgcgcgcttactttttcccatcaacaaagcatcaacccaatgaaaaggggtgaaatgcgcggcatcattcaccgcctgttcaacgcgcggtaatgtcaatttgccgtctggccagagcaggcttaaacgctccagtgcctgagccagcgccagcaggttaccttcataacagtagcagagcacctgatttgccgcgtcatccagttctaagttgagctgttttgcgcgcgcagcaacccagcggggaagctgagcctgctccggtgtctgacaggtcacctgcacgctgcgattcgcaagcgcagtaaaccaggcggcattttcttgcgctttgcttaatttattaccgcggacgatcaacagcaggtcgtcatgcagaagtccggtgagtgtgagaagttgctcattgatcgccgcattcggtccgttttctggtaacaacagcaatagcgtttgtcgactggcaaacagactcatagcctggcataagctaaagatcgcattccagtcagtgttgggatcaatggaaaaagtgtggtgttcttcgaatccttgtgccgcagctacctgacgaacagcgtcctggctttcctgcaataacagaggatcgttaccaagtaaaagatacgccgcgcgcagcccttcattgagctgcgcgcggagttgttccgggtacaaccgaatcatcagttacccagcgtggtggagacgcgtgcaggcgttgccggagtatccgttgtggtgctcgtctgttcttcgtcggaacgaatatccgcagcacggatgcttggcagcttacgaatcagctgttcggcagcacggtcgtacatctcttttacgatcatgtcttgttcgttatctttcgctaacgccatttgcgggttatcgaagaagctacggaagactttggcgctaatcgggtagatatcacggccggggatcaacacggtcgcattaaccgtcatgatcatctgatactctgctgtttgaccgttacggaatacgcttgcggtatctttcgcgatgctcactttacccaaacgcaaggatggaacgtccttacgcgtggtttctttatcaagcaactcgacaccattcagacgtaactggttacgcaccgcacggcttaatggcccgttcggatcgccactgtccaggatcatgaccttcatagtggaaggaacctgcgtggtatcacgcagatgccagccacacccggcggtgattaacaccgccagagataacaacaatgttgccagatatcgcacgcttcctcccgcgcttagccaacgaccagattgaggagtttacctggtacgtaaatcactttacgtacagtaacgccatcaagatattttgctaccagatgttcctggccagcacgttcgcgaacctgttcttccgttgcgtccaccggaacggtgattttggcacggactttaccgttaacctgcaccacgaccagcgtggagtcttccaccatcgctttttcgtcagcaaccggccacggcgcgttgtcgatatcgccttcgcctttcagttcctgccacagcgtgaagcagatgtgcggggtgaacgggttaagcatacggacaacggccagcagtgcttcctgcatcagagcgcgatcctgctcgccatcggttggtgctttcgccagtttgttcatcagctccataatcgccgcaattgcggtgttgaaggtctgacgacggccgatatcatcggtcactttagcgatcgttttatgcacatcgcgacgcagcgctttctgattttcagtcagcgcatcaacgttcagtgccgcaacatcaccttttgctgtgtgctcgtaaaccagtttccagacacgtttcaggaagcggttagccccttccacaccggattcctgccattcgagagtcatatcagccggagaagcaaacatcataaacagacgaacggtgtccgcgccgtaacgttcaaccatcacctgcgggtcgataccgttgttcttgctcttggacattttgctcatgccggtataaaccagttcatggcctgccgcatctttcgctttcacgatacggcctttctcgtcacgttcaacgatagcatcaaccggggaaacccagttacgttcgccgttttcgccaacatagtagaaggcatctgccagcaccataccctgacacagcaactgtttcgctggttcgtcagagttcaccatgcctgcatcacgcatcagtttgtggaagaagcggaagtagagcaggtgcataatggcgtgttcaataccaccaatgtagatatccaccggcagccagtagttagccgcttcggaatccagcataccttctttgtactgcgggcaagtgtagcgcgcatagtaccaggaggactccataaaggtgtcgaaagtgtcggtttcacgcagtgctggcataccgttaacggtagttttcgcccactccggatctgctttaatcgggctggtaatgccgtccattaccacatcttccggcaggatcaccggcagctggtcgtccggggtcggcattacggtaccgtcttccagcgtcaccatcggaatcggcgcgccccagtaacgctgacgggaaacaccccagtcgcgcaggcggtagttcactttacgctcgccaacgcccatcgcagtcagtttatcggcgatggcgttgaaggccgcttcatggtcaagaccgttgaactcgccagagttgaacagcacgcctttttcagtcagggcttgctgagaaagatctggctcagagccgtcagctgccaggataaccggtttgatgttcaggccgtatttagaggcaaactcgtagtcgcgctggtcgtgccccggtaccgccataactgcgcccgtgccgtactccatcaatacgaagtttgctgcccaaacgggaatttcttcgcccgttaatgggtgaaccgctttaaagccagtatcgacgccttttttctccatcgtcgccatttcagcttcggcaactttggtgttacggcattcgtcaataaaggccgccagttcaggattattttccgccgctttctgcgccagcggatgacccgcagctaccgccaggtaggtacaacccataaaggtgtccgggcgggtagtgtaaacggtcagcgtgttgtcatagtcgttaacgttgaaggtgatctccacgccttcggaacgaccgatccagttacgctgcatggttttaacggtgtctggccagtgatccagtttatccagatcgttgagcagctcgtcagcgtaagcagtgattttgataaaccactgcgggatctctttacgttcaactttggtatcgcagcgccagcagcagccgtcgataacttgttcgttcgccagtacggtctggtcgttcgggcaccagttgaccgcagaagtcttcttatataccaggccttttttatacagctcggtgaagaatttctgttcccaacggtagtattccggcgtacaggttgccagctcgcggctccagtcataaccaaagcccagcattttgagctggtttttcatatacgcgatgttgtcgtacgtccacggtgccggagcggtgttgtttttcaccgccgcgccttccgcaggcagaccaaacgcgtcccagccgatcggctgcaggacgtttttgcccagcatacgctggtagcgggcgatcacgtcaccgatggtgtagttacgtacgtggcccatgtgtagtcgaccagaaggatagggaagcatagacaggcagtaatacttctctttgctctcgtcttcggttacttcaaatgtgcgcttctcatcccaatgaagctgtactttggattctatctcttccgggcggtattgctcttgcatggcagccagtggtcctgttttcaatacggctacaaatgtagcgttgaggtggtttttcagatccgcatagcatagcccaaacgtccgcgtcaaaacagcctttcgcgcactcgacgttgaaatgatgcccggattattcatacattaatttacagagtttgtgggcgtattagcaaagcaaggaacaaagaacgtctattattatagtcagttaacgacccgggagatgaaacgatgaacaaggttgctcaatattaccgtgaactggttgcgagtctgagcgaacgcctgcgcaatggcgaacgtgatatcgacgcactggtggaacaggcgcgcgagcgcgtaataaaaacaggggagttaacgcgaaccgaggtcgatgagctgacgcgagctgtcagacgtgacctggaagagttcgccatgagctatgaagagagcctgaaagaagaatctgacagcgtctttatgcgggtgattaaagaaagcttgtggcaggagctggcagacatcaccgataaaacgcagcttgaatggcgcgaagttttccaggacctcaatcatcatggggtttatcacagcggagaagtggtcgggctgggaaatctggtctgcgagaaatgtcacttccatctcccgatctacacaccggaagtgctgacgctatgcccgaaatgtggtcatgaccagttccagagacgcccgtttgagccgtaatagtctgatttcgcacagcaataaagagaatatgggccgaatgaaattccccggcccttgtttttatctttacagtaaatcttcagtctcacgaatttcctgactgacatctctggttccggaactctgaactttacgatacaggtcgagagcctgtcggagatcgacaggtcttccttctccgtagtgatacataatggccaggttataccaggcagtggcgtcattgcattcagcggctttcgtaaaccattcaaaggcagcctgataatctttctcaacgccttgtccgtgtttatacatataaccgatgttgacgtaagcgccgacgctcccctgagcggcagccttcagataccagtacatcgcttgcttatagtcctggtccaccccttcgccagcgttataatcccatgcaatttgaaactgggcgtgccgattaccctgctgtgcgcttttcaaataccagaatgcggcgagtgtcttgttttgagcaacgccttttccgtcttcataaagatcggccagattgttttgcgcgtcactatggccttgtaatgcagcttgtttgtaccagaaaaatgccagcgcatagtcttttgcgactccgttgccatttctgtacatccacccaagattattttgcgcataagacattccgctctccgcggctatctgataccagacaaccgcttctttataattgggggcttctccacgatccagtgtccagccaagggcgttggaagcgaaagtatggccttgtagggcagcttttttcagccagaagatggcttgctcattatctttatgacggcttttatcctcggtatacttttgccctaaggaatactgtgcttcacaatgaccttgctcagcggccagcttcagccagtaaaaggctttttcgtcgtccggagaatcaattgcgctatcgcgattataataaaacccaacaatatattgagcctcgcaatcgcctttttcagcacgttcgataatctcatctatacttaaattatcgcagcaactactcgtgaaaatcattatcatttccttatggttgcagataaaacatattatatttttatgtgttccatttttgcgtaagccttattttatgcgtattatgtcgcgtcagaaaagtataaataaacgagcctcgcaatgcggctaatattcatttaatgaatatttaaggataaattatatggacatggagagccaaaaaatattgtttgcactttccactccgatggaaatacgcaatgaatgctgtttacctagccatagtagtcccaaaatgtatttaggtacatgcttttttgacctttcttccagttggggaattgatgaccgtgatgacctgctgcgcacaattcaccgaatgatcgataacggtcatgccgctcggttggcagggttttatcaccgctggtttcgttatagcccatgtgaatggcgtgactatcttgctgaactaaatgagcaaggtcaggcttatgcgcaatttgtcgccagcaccgccgaatgctgtggcgaagggggaatcaaagcctgggattatgtccggatgggttttttaagccgaatgggcgtacttaataactggttgagcgaagaagaaagtctatggatccagagccgcattcatctacgggctctacgttattatagtaactggcggcaatactttgccggttatacctttggtcggcaatattggcagtctcccgaagatgatcatctgcctttattacgcgaattcttagcgcgtaaagaatacgacgattccggcaatgatatgttttatcaattatttgccagtgatgatgcgtattaccctaccttgtcctggcaaccattggcttactattctgcatgcccggaaacgcttaaggatatgagcgacctatgaaaaattgctggaagatcctcgatatagaggaaacgactgacgtcgatattatccgccgcgcttatctggcgctgttaccgtcctttcatccagaaaccgatccgcagggttttaaacaacttcgtcaggcgtatgaggaggcgctacggattgcgcagagccctgctaaatctgtttggcaaccagaagaatatgaggtagcagaacatgaaattctgctcgcctttcgtgcgttacttgcctctgatagtgaacgttttctgccctccgcctggcagcgattcattcagcaattaaattattgcagcatggaggagattgatgaattacgctggagcctgtgcacaatcgccatgaacactgcccatttatccttcgagtgcgtggtgttattagcagaaagattgcggtggttacaggaggaaaataccggggaaatagacgaagaagaactggaatcctttttatatgccattgcgaaggggaatgtttttaacttccagaccattctgcatctgcccgttgccgtgcaaaatgacaccatcgatttttaccaaatgttcgctcggatttggagtagccatccacaatggctgacattgtatttagcgcaacatcgcgcagtgattatccccgatgatgcaaaactgcacagaaatttactccgctggtatagcgcaggtcgcctggatatccccgaacttctggattacgcccagagttggcgggaaactgaacctgataatgaagatgcgccttattatgaatacgcgcaacgcgtctattgtggagaaggcgaaagcctgttggcagaactttgtgactactggcgcgagtatccctccacccaggcggatgctttaatgttgcaatggtgccgtcagcatcgggtcgattattacccattactggtgatgatgattgaagcgcgtgatctggttaacgatcagggaaaaccgctactttatgtccccggcgacagcgcccgtacgcgttttcatttatacgaaatactcagcgatgaaaaactctctgcgctggggcgtagtctggtcgagatggttttgcacaaaggacgtaagccgcggatcagtctcacgcgtgatacagaacataccttatggccattatatctagttgccaaacaattagtgcaggcctgccaacctacagaagaaagtttaatgccgattgtgagccgccttgatgcagaaaatcgttgtccactggaagcattaattattcgtcgattattaattcaggcggcgaattttaccgagaagcaaactgttgaaccggagccgcaaccgcagccaatgcccgttgacgatggtgggccaggctgtctgggcatcattaaaattattttctatatttttatctttgctggtttgatagggaaaatactccatctgttcgggtgacagtcgacgttaatgtgcgggaagcccggcaagtaatctttccgcatttttgtaatgttgtttggcggtcagttttaaccatttttgagattcataatggttaacattaataccactgccatttctgtagatcaaacctaaagtatattgagcatgagcatacccttgttcagctgcttccttataccagagaattgctttacgggtgtcgggtttgacccccagacctttgaggtagatccaccccagtttactttgcgcgcgtggattttcctgttccgcactttgctcataccagtatctcgcctgtgtataatccagtggtttaccgtcgctaccatgaagataaaattctccaaggcgatattggctcgtactgtgaccatgaatcgcggaaagctccgtggctgccgtggtgaatggaagactgcccggactgcttaaataatcaaaggcataattcaccatggctttatcacgcaacgtcgttttcttgggttggctaatacaggtaattgctgcaactataaaaattgcgaatatatacattaattttttattcatgtgtgaatgcttcgattttctttttattttgaaagcgtcaagtttatactcatcaataataaaaaagtagtcagttaatgcacttaagggattattaacaaatgaataaggaagaacaatatcttctttttgcgctttctgcgcccatggaaatacttaatcagggttgcaaacccgcgcatgacagcccaaaaatgtatactgggataaaagaattcgagctcagtagttcctggggaataaataatcgtgatgatttaattcagactatttatcagatgactgatgatggtcatgccaatgatttagctggcttatatctgacatggcatcgctcttcccctgaagagtggaaagcattaattgctggtggcagcgagagagggttgatttatacccaattcgttgcccaaaccgctatgtgctgtggggaagggggaatcaaagcctgggattatgttcgaatggggtttctgagtcgggtcggtgtgctcaacaagtggctgacggaagaagagagtttatggctgcaaagccgcgtctatgtacgagctcaccattactatcacagctggatgcactatttttccgcctatagcttaggacgtctctactggcaatcttctcagtgcgaagacaacactagcctacgcgaggcgctaaccctgtacaaatacgatagcgccgggagtcgtatgttcgaagagctggcagcgggaagcgatcgtttctatgccacgcttccctggcagccattaactgtccagtctgaatgcccggtaacgcttaaggatgtgagcgacctatgaaaacatgttggcaaatcctcgaaattgaaagcacgacgcaaatagacattatccgccaggcttatcttgctcgcttaccgttgtgtcatcccgaaaccgatccgcaagggtttaaagcattacgccaggcctatgaagaggccctgcgactggcggtaaatcctgtcgaggaagcagatgatgaagaaaaagatgctgccgctgaacatgaaatactacgtgcattcaggacattactggatagtgaaagtgatcgttttcagccttccgcctggcagaaatttattcagcaattaaatacctggaacatggaggatgtcgatcaattacgctggccgctgtgtgcaatcgccatagaagcgcgatatcttagtttaaattgtgcttctttgctggcagagcgtttgaactggcatagttttaatgacagcgaaggaatggatgaggaagaaagggaggcttttcttgaggccattcaggctggtgattgtttcgatttccttagccttctggaatatcccattgcgttgcagaaccagactgttgagtattacttcgcgctggaacgttgctgccgttaccatcctgactatgtcactgcgtttttggcgatggaaggtccgtggttaattcctgatgatgcaaagttacatcgcaaactgttgcgctggtacagcagcgtgcaaacaggtatggcggaactcattcctgtcgctcaacagtggcaaacggaagaaccagaaagcgaagatgcccggtattacttgtgtgcacaacgtttgtactgcggcgagggggaaagcctgcttgccgatctctgcgcgtactgggaaagttacccatctacacaagctgataatttgttgttgcagtggagcaagcgtcattgcccggattatttcgcgttattagtgatggttatcgaagcgcggagcatggtagatgcgcaaggtcaaccgctgaaatatgttcctggtgagagcgcccggacgcggctgttatgggcggagattttacatagcggaaaattaagcccgttaggtcaaagctttattgagagcttattcttcaagcgcaaagcatgggcgtggtggaaaagcagagtcggtagcgagacagagcaagatagtccgttcctggatttgtatcgggtagcggaacaggtagtacttgaagcgtttccgaaacaagagatgctggcccgtcttaatacaaggctggaaggcggagatgctcatccattagaggccattgtcacccggatgcttttgacgaaagtgaaactcgagccggaggatgaagatgtcgatgagccaacacctgaaaatcatgaagaaaaaaatgatgagggtgaaaaaccacagagcattaccagcattatcaaaatcagtttaacggtgctggtgataggttatgctctcggcaaaatcgcgatgttgtttagctgacgatgtgttttttgcgccgatgccggatgcagcgtttacgccgcatccggcagccgtgtttatgggatctcaatggctaaataatcgctcgcccgccgccgaacttcatccacgcgggccatatcgttactctgcaacgccgcatcaaaatcggtgatcacccggccgatctcttctcgctcgtcacccagcgcccgcgcccacaactcttccagtttggctttaaaggtgcgattgatgagcatatcgcgcggataaattttcaatgcggataaccgcgtccgactctcttcaatctgctgcgcgctcaatgttaccgggctgtggttaatcactctggacttaacgctgccgtcttccagaagcacgtcaacttcaagcaacccgttgatatcataactaaagcgaatatcaatgctctgataagccccggttttcttcaacggcacatcgaaggattccaccagaatgttgtttttaactttgtggttttctccctgatagacgttaaccgtaatactatcctgttccgggtgcatggtactataagtttctacacggctcacgggcacagtggtgtttcgttcaataatcgggctgaaaatgccggaaacgccctggcggttaacttcaacgcccaagctgtaagggcaaatatcagtgaggattacctcttcaatatcttcactgcgtaagcggcaggcggcctggattgctgcgcccagcgcgacaatggtgctcggatcgtaactttgatacggtaatttgccaaacagacgcacggcgattcgctgcaccagcggcatttgactcgcgccgccaaccagcaccagactgtcgatttgactcggcttcagacgcgcatcgcgcaacgcctgttcaatcggcactcgcaagcgattgagcagcggcaaccacaaatcttccagttcgttctcgtaaaattcgcattcccgcgtttcttcctgatactgccagcgaatgtgcaatgggctttgattgctacattttgccgcttccacacaggcgtacaaggctgccagttcactctcgttaagcgtggtcctggcgacatccgcgcgttttaaaacctcatcgaccagcatatgggtaaaatcttcgccaccaagaaagttgtcgccagcggaggcgtgaacttcaatcaccggcgtggcgtactcaagcaccgtaacgtcaaacgtgccgccaccgagatcaaacaccaggctacgggtattttgttgggtatgcaggccatacgccatcgcagctgctgtgggttcattaattaagcgtaccgcatttaacccggctaactccgctgctaaacgggtatgcttgcgttgttcatcgctgaaataagccggaacggagatcaccacatctttaatcggacgttgcagaaattcttcggcatcttcttttaaactgcgtaataccaaagaggacagttctggcgcgttaaatgtgtcgctgcctaaccgccagttggtattactgcccattgcacgtttaaataacgctgccgttttatccggatggctagtacgccgacttacagccggttttccgactaaaatatgattattttcatccatgctaattatggatggtgttaaatattcaccgaacttatttggaattaattgcgcggcaccgtctttccagacggcaattaaactattggtagtaccgagatcgataccaatggcgagttctgcattatccattgcatttatatcttgaaagaaaaagagataaacagattaagaccacccaggtaacgcgtggtgatcttaatcaatgacgtgtgttaagcgtaaaatttcagacgatcagccagtaaatcaacaaagccctgacgatcaacatcgaccattacggtggcattcggtttattgcctgtcagataataataatcaacaaccgtcataccctgggtatatttcccctgtgtttccacgccaacccagcgctcaacagaggtaaataactccggtttcaacagccaggcgatggtgcatgggtcatgcagtggtgcgccgacaaagccccatttttcgtctttatgatattcgaggaagaaatccagcagttcggcaacaatggtactaacagggttaccaatcgcgcggaaacgctcggtgtcttcaacgtggatttgtgctttatgagtaacatccagaccggccatcaccaccgggatcccactctggaagacaatttctgccgcttccgggtcaacgtaaatattaaattcagccgcaggcgtccagttacccagccccatagcgccacccataatcacgatacgggcaattttgctatgcagttccggatggctattgagcagcaaggcaacgttagtttgcggtccggtagacacaatggtgacaggttccgcactttcacgcagcgttttcgccatcagctctaccgccgtacagttttgcggtgcgaatgtcggttccggtaatgccgggccgtcgagaccgctttcgccgtgcacattgtccgcgataatcaactcacgcattaacggttttaccgcgccgcctgctaccggaatatcggtgcgattaagcaaggtcagcatacgcagaacattgcgtaaggttttttctggtgtctggtttccggcggaagacgtaattgctttgacatcaagctctggactggcgagggcgagaactattgcgatagcgtcgtcatgacctgggtcgcaatctaacagaattggcagtgccattgttgctccttgttgtgtgcttctttgcgacaagggtaacgccaggatgtaacagatacgaggggcgaaacgataaagcgtgagatggcgcgcaattgggtatgcgcgccagagtgattaatgcaggattttcgcgaggaagtcttttgcgcggtcgcttttcggatcatcgaagaaagcgtctttcgggctgtcttcgacaattttaccctcgtccataaagatcacccgattcgccactttacgggcaaagcccatttcgtgggtcaccaccatcatggtcattccttcgttcgccagttccaccatcacgtccagtacttcgttgatcatctccggatccagcgcgcttgtcggttcgtcaaacagcatcgcaataggatccatacacaacgcgcgagcgattgccacacgctgctgctgaccgccggaaagctgcgccggaaacttattggcgtgagcagaaagcccgacacgctccagcagtttcagggctttttcacgagccggcgctttatcgcgtttaagcactttcacctgcgccagggtcaggttttcgataatgctcagatgagggaacagctcgaaatgctggaataccatcccgacgcgggaacgcagctttgccagatcggttttcttgtcgttaaccacgataccatcgacggtgatttcaccttgctgcaccggttcgaggccgttgacggttttaatcagcgtacttttgccggaaccagacgggccgcaaaccaccaccacttcgccttttttcacttcggtactgcagtcggtcagcacctgaaagtgaccataccatttactaacatttttcagggtaatcattatgctgtccttcttttcaagtagctgaccaacaagctcgcgctaagactaataacgaaataaacaaatccggcaaacaggatcatctcaacctgcgtaccatcacgctcaccaatggtactggcggtacggaagaaatcggccagggataacacatacaccagactggtatcctggaacagtacgatgccctgagtgagcagcagcggcaccatcgcgcggaacgcctgcggcagaataatcagtttcatgctctgccagtgagtcattcccaacgccagcgcggcgctgctttgaccacgagaaatactttgaataccagcacggataatctcactatagtaggccgcttcaaacatgctaaacgccaccatcgcgctaattaaacggatatcattttttgggcttaatcccagcacgttttgcagaaaacccggcacgatcaggtaaaaccacagcaaaaccataactaaaggaatgctgcggaatacgttaacgtaggctttggcaaaccacgccacgggcgcaaagctggataaacgcatcaccgccagcatcgtgccccacaaaataccaatcactaccgccgtgacggtgattttcagggtgatcaccagcccgtcgagcagatatggcagggaagggacaatggaactccagtcaaactcgtacattatttgccccccatgttgccaggcaggcgaactttacgttcaaccagcgtcatcaccagcatgataaaagcgttaatcaacacatacgccagcgtaatggcggtaaagctctcccaggcatgggcactgtaatcgagcaatttacccgcctgcgccgccatatccaccagaccgatagtgctggcgatggcggagtttttcaccaggttcatcatctcactggtcatcggcgggacgataacgcgataagcattaggcagcagtacgtatcgataagcctgcggtagcgtcaggcccatcgccagcgcggcatttttttgccctcgcggcaggctctgaatcgcggcgcgtacctgttcgcaaacacgggcggcggtaaacagccccaggcagagcatggaactaaggaaaaactgaatattgggatccagctcggccttaaaccacatgccgattttctccggcagcagctccgggatcaccagataccaggtaaagaattgcacaatcaacggcacgttgcggaacagttcgacatacaacgtacccagaccagagagaaaacggtttggaacggtacgtaaaatgccgaaaaaactaccgacgaggaaagcgataatccaggcgcagatgctcaaagcgatcgtcacctgaaaaccactccagatccaaccaagataggtggtgttgccgaacggggcttgttgtaaaaaaataccccagttccagtctatagacataaatctactccagaaaaaagagggtagcagcgttaactgctaccctcgaagattgttacccagcgtattgcggttttcaggcccgatggggaacgaccatcaggcgtatagtctgtccgtgctacgtaacaatcgagagggctggaatttccgcccctggttcttgtaattagttcagtgccttgtcattcggttctttgaacagtgctttcatttcgtcactcagttcgaaattcatgttcaggtttttcggcggaattggatttttgaaccacttatcaaaccatttttccgcttcaccggaggtctgcacctgagcgatggtgtcatccatcagctttttgaactgcggatcatctttacgcaacatacaaccgtaggcctcctgagactgcggcttgccgacgatttcccagttgtctggtttcttcgctttcgcacgttcaccggccagcagagcgtcatccatcataaaggcaacggcacgaccgctttccagggtgcggaaagagtcaccgtgatctttggcgctgatgatgcgcatattcattttttgctcttcattcagtttgttgagcaaaacttcagaggtagtgccggaagtgacgactacggctttgtctttcaggttggcaaaatctttgatatcgccaccctttttggtcaacaggcgcgtaccgaccacgaaaatagtgtcagagaaagccgcctgtttttggcgttcgacgttgttggtggtagaaccacattcaaaatcgaaagtgccgttttgcagcagtggaatacggttttgactggtaatcggaatcagttttacctgcaagtccggtttgttgagtttctttttcactgcttcaacaatggcgttggagtaatcctggctgtaacccaccactttttgctgattgtcgtaataagagaaaggcacactagattcacggtgaccgacgacaatcacaccgtttttggcgattttgtccagagtactgcccgctgccggggcggcgtcatctgcctgtgccagtcctgcggaaagcgccagggcgaggattgctgtggcaggtttacgtaattgcatatccaactcctttatcttctgcgttaagaacgcatggatacccgttgtgagtgtttgtgttgttatcgtctgcaactttattgtgcagtgttgtgcctgttagggaaggtgccttaggtaacatttagtttggctaaatgtaaagatattgctgttttattgtttgtttttgcgagatgcgccgcaccattccgaagcaaaattcttaaaatgcactcttttagtgctaccgctggattactgtggtgcaactaggttgtactgatgctgtttcagggtttgccttgtataacaaagcaatagatgtgccaaagttggataggagaatattgttatccggataatgcactgatgccgcatccggtgagcgtgccgaaatatgggatgtattccggcacgataagaagggattatttacgtcgctgacgcagactcatcaacacagcagcaaaaccaaacaatgccgtcagcacccacagcggccagttgccggtacgtgcgtatggtgtgagtccggtggtcggcgtcacgttagtggttaacacctcgcgggtgaactgcgggatcatcgcctgaatctcaccctgcgggccaatcaccgccgtaatgccgttgttggtgctgcgcaacagtgggcgcgccagctccagcgcacgcattcgcgccatctggaagtgttgccatggaccaatagatttaccaaaccacgcatcgttggagatagtcagcagatagtcggtatccgggcggaagttatcgcgcacttgctcgccgagaatgatctcgtagcaaatagccgcagtaagctcaataccatttgcgctcagcggcggctggatatatggcccacggctgaagctgctcatcggcagatcaaagaacggtgctaacggacgcagaatgctctccagcgggacaaactcgccaaacggcaccagatggtttttgttatagcgatcggcactttcgtagctgtacggcgcacctttacccagcgtgatgatggtgttgtaggtatcgtagcggttctgcttattgagacgcgcgtcgacaatcccggttaccaggctgctacctttatcacgcaactcaccgtccagtgctttgaggaacggttgctgattaatttccagatcggttatcgcgctctccggccagataatcaagctacttttgcccatcagcggtgccgttgcgttgtagtaaatcttcagcgtattaagaagctggccttcgtcccatttcaggctttgcggaatatcgccctgaaccatgctaacctgaatggttttctccggttgtggggtaaaccactggatgtaacgcagcgggaagggaagggcaaacagcacgacggccaccaccagcggacgccagttgcgtttgaccaacgccagtgccagcaggccactaaccatcatcagcaggaagttaatggcttccacgcccattatcggtgccagcccttttaacgggccatcaatctggctatagccgaactgtaaccacgggaagccggtcagtacccaaccgcgcagaaactcggtcacttgccagagggcaggggcggcaatcgctacgcgcagccaggtggttttcggccacagacggctcagcacgccagcaaacagtccggtatacaggctcaaatacgccgccagcagcaccaccaggaagatgttaaccgggccaggcattccgccaaaggtcgcgatgctgacatagacccagttaataccgctgccaaagaggccaaatccccagcaaaagccaatagcggcagactggagtggacggcggttaaaggtcaacgcctgaagccccatcaggctaataatcgccgcaggccagacgtcgtaaggagagaaggccagcgttccgcaggcaccgaataataacgccagcagcaggcgaatgcgctggcgttcaattaaactggcaaaagccatgtagttatctatccagtttcggttttattcatccagcttcggctggggactgtcatccgggattttgacatgaacctgaataatacgccgactgtcggccatcgccactttgaactggtaaccgtcgatgtcgatagtttcgccacgcgccggaagatgcccaaatgcctgcatcaccagaccaccgatagtgtcgacttcttcatcgctaaagtgggtgccgaacgcttcgttgaagtcttcaatggaagccagtgcgcgtacggtccaggtatgacgactcagctgacggaagtcgatatcatcttcttcgtcatactcgtcttcaatctcaccaacaatcagttccaggatgtcttcaatggtcaccagaccggaaaccccaccgaattcgtcaataacgatcgccatgtggtaacgctgagagcgaaactctttcagcatccggtctacgcgcttactttcaggaacgacaaccgcctgacgtaacactttgtccatgctgaaggcttcagcatcgctgcgcataaacggcagcaagtctttcgccatcagaatcccttcaatgtgatctttgtcttcgctaatcaccgggaaacgactgtgggcggactcgatgatgacatcaagacattcgtccagcgtctggttgcgtttcagggtaatcatctgggagcgggggatcatgatgtcgcgaacgcgttggtctgcgatgtccatcaccccttcgagcatatcgcgcgtatcttcgtcgataaggtcgttctgcccggaatcacggatcagcgccagcagttcgtcacggtttttcggttcaccgtggaaaagttggctgagtaacagggagaaaaatcccttcttgttgcttatcgtgtcactactgtgactattgtcgtcgctcatggcgtcgtatgggttctcatgttagttaatcaaaacgccgtcgttaatcaccaacggcggggacgtctgccagtcaaatgcctggcaaattattctttctcggcaatgtacggatcctcatagcccagagcaagcataatctctgtttcgagggcttccatttcttctgcttcgtcatcttcgatgtgatcgtaacctaacaaatgcagactgccgtgcaccaccatatgcgcccagtgcgcctccagtggtttgccttgctcctgagcttccttctcaaccacctgacggcagataaccagatcgcccagtaggctcatttccatgccaggcggcacttcaaacgggaaggagagcacgttggtcggcttatccttaccgcgataggtcagattcagactgtggctttcggcggtatcgaccacgcgaatcgtcacttcgctttcttcctgaaactgcgggatcaccgcattcagccatgtctgaaactggctctcttccggtaacccggaattatcttcacatgccagttgtaaatcgaggatcacctgactcatttttgttcctgttcttcgcgcttgcgttctgctgccagcgccgcttttcgtttttgttcggcttcttcccaggcttcataggcgttaacgatacgcgccaccacagggtgacgaaccacgtcttcgctgtggaagaagttaaagctgatctcttcgacatcggccagcacttcgatggcgtgacgtaagccacttttagtattacgcggcaggtcgatctgtgtgacgtcgccggtgataaccgctttactgttaaaaccgatacgggtcaggaacatcttcatctgttcgatggtggtgttctggctctcatcgagaatgataaacgcgtcgttcagcgtacgaccacgcatataggccagcggtgcgacttcaataacgttgcgctcaatcagtttctcgactttctcaaagcccagcatttcaaacagcgcgtcgtacagcgggcgcagatacgggtctactttctggcttaaatcgccaggcaggaagcccagtttctcaccggcttctactgccggacgagtcagcagaatacggcgaatttcctgacgctccagggcatcaactgccgcagccactgccaggtaggttttacccgtacccgccgggccaacgccgaaggtaatgtcatggtcgagaatattggcgatgtactgcgcctggtttggcgtgcgcggcttaattacgccgcgtttggttttgatattgaccgctttgccgtactccggcacgctctccgcgctttgctccagtacccgcgcttctttaatcgcaaggtggatctgttccggttcgatatcctgaatctgaccgcgcatcggggcagtatcgacatacaggctacgcagaatgtctgccgcagcggtgacgcaaatcggacggccggtcagtttaaagtggttatcgcggcgattgatctcgatgccgagacggcgttcgagctgcttgatgttgtcatcaaacgggccgcacaggctcaacagacgcgcattgtctgctggctccagggtgatttcgcgagtgtctatgttcaaaccgttcctcttatctgtatgccgccggaagctgaacattcaccggcctataaggaaattattcacgccacaggaaaaaggcgcaagcattgcaataaagatggggataaagagagaaaaaacaaggcccaccggaacggcaggcctgagaattacggctgataataacccacgccaaggtcgttttctttgcgggtacgggcaatcacactttccggtgtttctgccacgcgcagacccatttcatcttcagtacgcaccactttaccgcgcagagagttcgggtagacgtcggtaatttctacatcgacgaatttaccgatcatatccggcgtgccttcgaagttgaccacgcggttattttccgtacgcccggaaagctccatgatgctcttacggcttgtaccttctaccagaatacgctgggtggtgccgagcatccggcggctccacgccatcgcttgctgattaatgcgctcttgcagaatatacagacgctgcttcttctcttcttccggaacatcatcaaccatatcggcggctggtgtacccggacgtgcagagaagataaagctgtagctcatgtcgaaattgacgtcggcaatcagcttcatcgttttctcgaagtcttcggtggtttcgccagggaagccaacgatgaaatcagaactgatctgaatatctggacgcgccgcacgcagtttacggatgatcgctttgtactccagcgccgtatgggtacggcccatcaggttcagaatgcgatcggaaccgctctgtaccggcagatgcaggaagctcaccagctccggcgtgtcgcgatacacttcgatgatatcgtcggtgaattcgatcggatggctggtggtaaagcgaatacgatcgatcccgtcgatcgcagcaaccagacgcagcagatcggcaaagcttccggtggtgccgtcgtagttttcaccacgccaggcgttcacgttctgaccgagcaggttgacttcacgcacgccctgagccgcaagctgggcaatctcaaacagaatatcgtcggacggacggcttacctcttcaccacgggtgtaaggcaccacgcagtaggtgcaatatttattgcagccttccatgatggagacaaacgcggtcggcccttcggcgcgcggttccggtagacggtcaaacttctcgatttccgggaagctgatatctacaaccgggctgcggtcgccacgcacggagttgatcatctccggcagacggtgcagcgtttgcggcccaaaaataatatcgacatagtgggcgcgctggcgaatgtgctcgccttcttggcttgccacgcagccaccgacgccgataatcaggtctggattcttctcttttaacagtttccagcgacccaactgatggaagactttttcctgagccttctcgcggatactgcaggtgttcagcagcagcacatccgcttcttccgccacgtcggtcagttgatagccgtgggtggcatccagcagatcggccatcttgctactatcgtactcgttcatctgacagccccaggttttaatatggagttttttggtcatcgacttgctcttgcgaaatagtagccaggaatgcagggcgcatagtgtaatgctttgctgccgttgtgaccagtatgagcgttatcagcccttaggggtaaaaatcctgtaaacttaaagcatattgctaacaggatgattgaccatgacaaatcaaccaacggaaattgccattgtcggcggaggaatggtcggcggcgcactggcgctggggctggcacagcacggatttgcggtaacggtgatcgagcacgcagaaccagcgccgtttgtcgctgatagccaaccggacgtgcggatcagcgcgatcagcgcggctagcgtaagtttgcttaaagggttaggggtctgggatgcagtacaggctatgcgttgccatccttaccgcagactggaaacgtgggagtgggaaacggcgcatgtggtgtttgacgccgctgaacttaagctaccgctgcttggctatatggtggaaaacactgtcctgcaacaggcgttgtggcaggcgctggaagcgcatccgaaagtaacgttacgtgtgccaggcagcctgattgcgctgcatcgccatgatgatcttcaggagctggagctgaaaggcggtgaagtgattcgcgcgaagctggtgattggtgccgacggcgcaaatagccaggtgcggcagatggcgggaattggcgttcatgcatggcagtatgcgcagagctgcatgttgattagcgtccagtgcgagaacgatcccggcgacagcacctggcagcaatttactccggacggaccgcgtgcgtttctgccgttgtttgataactgggcaagcctggtgtggtatgactctccggcgcgtattcgccagttgcagaatatgaatatggcacagctccaggcggaaatcgcgaagcatttcccgagccgtctgggttacgttacaccgcttgccgctggtgcgtttccgctgacgcgtcgccatgcgttgcagtacgtgcagccagggcttgcgctggtgggcgatgccgcgcataccatccatccgctggcggggcagggagtgaatcttggttatcgtgatgtcgatgccctgattgatgttctggtcaacgcccgcagctacggcgaagcgtgggccagttatcctgtcctcaagcgttaccagatgcggcgcatggcggataacttcattatgcaaagcggtatggatctgttttatgccggattcagcaataatctgccaccactgcgttttatgcgtaatctcgggttaatggcggcggagcgtgctggcgtgttgaaacgtcaggcgctgaaatatgcgttagggttgtaaccttacaacattgccggatgcgtgccaaccgtaggtcggataagacgcggcagcgtcgcatccgacattgaaggataagacgtgtcaacatcgcattcgacattgaatgaacgcagaaaagcaaaaagctcgccgaagcgagcttttttaatgtggctggggtacgaggattcgaacctcggaatgccggaatcagaatccggtgccttaccgcttggcgataccccaactgggtgcacttacaaggtaagcgtcttgaataaattggctggggtacgaggattcgaacctcggaatgccggaatcagaatccggtgccttaccgcttggcgataccccaacaaattggttttgaatttgccgaacatattcgatacattcagaatttggtggctacgacgggattcgaacctgtgaccccatcattatgagtgatgtgctctaaccaactgagctacgtagccagattgtttcttcgatggctggggtacctggattcgaaccagggaatgccggtatcaaaaaccggtgccttaccgcttggcgataccccaataaccgggcggtgaaccgcttactcgaagaagatggctggggtacctggattcgaaccagggaatgccggtatcaaaaaccggtgccttaccgcttggcgataccccatccgtacaacgctttctggtgaatggtgcgggaggcgagacttgaactcgcacaccttgcggcgccagaacctaaatctggtgcgtctaccaatttcgccactcccgcaaaaaaagatggtggctacgacgggattcgaacctgtgaccccatcattatgagtgatgtgctctaaccaactgagctacgtagccatcttttttttcgcgataccttatcggcgttgcggggcgcattatgcgtatagagccttgcagcgtcaacctctttttcaaggaaaattgctcgaaagtgactgtttggttaggttgcgaacagcgtggcgctatattcgtcaattattgtttactttgtgttttttcccaccctacagccattcttttgtcatacaggatgaaattcggaatttaacaatagtggtgggaaattaatctatgaaatactggcctacagtgatgagttgtcaaacagtgatgtggcaaacccggaacatttccttactgcatatcagaatcaacaagcacctcaataactgaaacagccccggatttcaccggggctgtttcgcatttcttacttatacgcgctctggtgaacaccaaccgcgcgaccagacggatcgtccattttcttgaacgcttcatcccattcgatcgctttagcggaagaacaagcgacggaaggaccgcccggcacgcactcagcggcgctcggaagcgggaatagttcttcaaagatctcccgatacaagtacgcttctttagaggttggcgtgttgtacgggaagcggaagcgggcagtttccagttgctgatcagaaacctgctgcgcagccacttctttcagggtgtcgatccaactgtaaccgacgccatcggagaactgctctttctgccgccaggccacgcttgcaggcagatacgcttcaaaacattcacgcaggatgtgtttttccattttgccgttaccgcacattttatcctgtgggttaatacgcatcgccacatcaaggaattttttgtcgaggaacggaacgcgtgcttccacgccccaggcactcatcgctttgttggcacgcgcgcagtcatacatatgcagggccagcagtttacgcaccgtctcttcatgcagttctttggcattcggtgctttgtggaagtaaagataaccgccgaacacttcatcagaaccttcaccggacagcaccattttaatgcccatcgccttgatcttacggctcattaaatacatcggtgtactagcgcgaatagtggtcacatcataagtttcgatgtggtaaatcacgtcgcggatggcatccagaccttcctgtacagtgaagtgaatttcgtgatgcaccgtgcccagatggtttgccacttcctgggctgctttcagatccggactacccggcagacctacagcaaaggagtgtaactgcggccaccaggcttcagagcgttcctgatcttccacgcgacgggctgcgtatttcttggtgatagcggaaataatactggaatccagaccaccagaaagcagcacaccgtaaggcacatcagacatcagatggcttttaacactatcttccagtgcctgacgcagctcgtttttgtcggtcacgttatctttcaccgcatcgtagtcgaaccagtcgcgatgatagtaagaacggatttcgccgtcctggctccacaaatagctccccgccgggaactctttaatcgtgcggcaaactggcaccagcgctttcatttcactggccacatacagctgaccgtgttcgtcataccccatatacagtgggatgatccccagatggtcgcgaccaatcaggtaggcatctttttcgctgtcgtacagtgcaaaggcaaacatgccctgcaagtcgtcgagaaattccggccctttttcctgatacagcgcgaggatcacttcacagtcagacccggtctggaactggtaacgatcgccatattcggcgcgcaatgcctggtggttgtagatttcaccgtttaccgccagtacgtgggttttttgttggttgtagagaggttgcgcccccgcgttaacgtcaacaatactcagacgttcgtgggcgagaatggcgttatcgctggcataaataccggaccagtccgggccacgatgacgcatcaggcgactcagctcgagggctttcttacgcagctcaactgcgtctgttttgatatcgaatacgccaaaaatactacacataaccttctccgttaacctggtatttgttgcttgttgtgtttgcttgtttaaaaaaatgccgcaaagcagcactgtgcgcaagcgatttggcggtgaaaaaataaaaaacgtaatggtgattgtcgattggtgaaaaaaggtctggtgtgaggatatatttattgatgaatcgataatttttagcgggttttattgaatgtttatattttacgggggccaaattgctgacaaagtgcgatttgttcatgccggatgcggcgtgaacgccttatccggcctacaaaagcatgaaaattcaatatattgcaggagctgcgtaggcctgataagcgtagcgcatcaggcagtttggcgtttgtcatcagagccaaccacgtccgcagacgtggttgctattcagataacgtcgatttcagcgacactcgggtaaatccagctggggcggaaaggcatactgtcgatatcgtcgaggctgctaacaccagaaagcaccagaatcgtctccagacctgcctggaagccggccagaatatcggtacgcaggttatcgccgacaatcaccgtttcttcgctatgcgcctgcattttgtttaatgctgcgcggatgatccacgggctgggcttaccaacatagaacggtttgcgcccggagattttctcaatccctgcacacaacgcgccacaagcgggataaaaaccgcgcccgtgggtgtccggattggtggcgataaaacgtgcaccgttagcgacgaaataggctgctttatgcatcatgtcccagttgtaggaacgcgtttcgccaacaatcacgaaatcagggttcacatcggtaatagtgaaaccggctttgtacagttcatgaatcagtgcgccttcgcccaccacatacgctttcttgccttcctggcgacgcaggaaatcggcagtcgccatcgcagaggtataaaacacgctgtcaggtacatcgacacctgcggtggcaaagcggttcgccagatcttgcccagtctggctaggatagttggtcagcaacaccagcggcaggcctttatccataatcccgtgcaaaaattccgctgcacccggtacggcgacgttatcgtgcatcagcacgccgtcgatatcgcaaattacatttttaatggtcatggactacccagaatattgacaacaataagcgccactataaaagcacattaattttccagcaaatgctggagcaaaataccgttgagcatggcgcgttttaccagcgcaaaagcgccgattgcgctgcggtgatccagctcagaacgtaccaccggcagattagtgcgaaacgccttcagcgcctgggtattaatgcagctttcaatagcagggagcagcactttatcggcttcggtgatttcaccggcaataacaattttttgcggattaaataagttgatagcaatggcgatggttttacccagatgacgaccgacatactcaattacttcgctcgccagactatcgcctttgttcgcggctttgcagatagttttgatggtgcagtcgtccagcggcacgcggctctggtagccctgctttaacagattcaacacccgttgttcaatggcagcgttggcagcgatagtttccaggcagccaaagttgccgcagtggcagcgttcacccagcggttcgacctgaatatggccaatttcaccgacgttgccgttgcggccaataaaaatgcgcccgttagagataatcccggccccggttccgcgatggacacgcaccagaatggagtcttcgcaatcctgacttgcaccgaagtagtgctccgccagcgccagactacggatatcgtgaccaacgaaacaggtcactttaaaacgttcttccagagcttctaccagcccccagttttctacctgaatatgcggcatgtaatgaattttgccgctgtccgggtcaacaagccctggcaggatcacgctaatcgcgatcagctcgcgcagtttgcgctggtagctatcaataaactgagcaatggcattcaacagggcatgttccagcgtttgctgggtacgttccggcagcgggtaatgttcttctgccagcactttgctgctgagatcaaacagagtgatggtggcgtcatgacgaccaagccgtacgccgattgcgtggaaattgcgggtttcggtgacgatggagatagcgcggcggcccccggtggaggcctgctgatcaacttctttgatcagcccgcgttcgataagctgacgcgtaattttggttacgctggcgggggcaagctggctttgctcggcaatctgaatccggctgattggcccgtactggtcaatcaggcgataaaccgccgcgctgttaagctgttttacgagatcaacattacctatctgagcttgtccgcctggtgtcatactttctcttattgagttacgacctcgttaccgttaacgatggtcttggtgattttaaaatcaggtgtgaatgcagtcaggttggctactttacctgcggcgagtgtgccgagacgtttctcaacgccaatcgcacgcgccggatagagcgtcgccatacgtagcacttcatccagtgcgataccgcaatgttcgaccagattacgcacgccttcaatcatggttaaggaactaccgcttaacgtaccgttctcatccacacaaagtccgttacggtagtatattgttttacccgcaaaaatgaactgttcaatgttggcacctgctggcgcggtggcgtcagtaaccagacacagtttgtcgcctttcagacgtttagcgttgcgaatgttggcgtaatcaacatgcaggccatcagcaataataccgcaataaatgtcagcttcgtcgaggatcgcgcccgccaggccaggttcacgaccggtaatatacggcatcgcgttgtacagatgggtggcaaaggtaatccccgcgcggaaaccggcttttgcttctttcaacgtcgcgttggagtgaccggcagaaaccacaatcccggcatttgccagtttgctgatgacttccgcaggaaccatttccggtgccagggtcactttggtaatgacgtcggcgttttcacacaggaaatcgaccagcgcggcatcaggcttacgcacaaaattcggattatggatgcctttttttaccagattcagccacggaccttccagatgcagacctaacgcctgattcggatgttttgccaggtactcgcgcataacgcgcacgccctgtttcatcagctcatcgctggtggtgataagcgtcggcagatagttagtacagccacttttctcattggctttctgcatgatttccagcgtttccacgctgaccgcttcagcggtgtcgttaaactgtacgccgccgcagccgtttaactgcacatcgataaaaccgggggagagaatggccccgttcagactacgttgttcgatctctggcggcagttccgctaccggacagacgcttttaatcaggccatcagcgataacaaccgcgtggtcatcaagaaattcgtggccggtaaagatccggccctgggttaatgcatacattctgacccccgattttaaaaaatattgccctgagcaaggagccagggcagggataacaattacagacctttgatattttctgcttctaattcattgaaatatcttaaagtcttaactttcagctccatggtggaaggttcatcgcacaccatgatcgctttcggatgcagttgcagacagctgatggtccacatatggttcacgcaaccttcaacggcggcctgcagcgccagtgctttctggctacccagcaccagaatcatcacttcttcggcatccagcagtgtaccaacaccgacagtcagggcatattttggcacctgattaacatcgttatcaaagaaacgagagtttgcgacgcgagtgtcatgagtcagggttttgatacgagtacgagaagccagagaagacgccggttcgttaaatgcaatatgaccgtcgttacctacaccgcccataaacagatgaatttttccgtaagaacggattttttcttcatactggcggcactcggcgtcgatatccggggcgttgccgttgagaaggttgatgttttctgctggaatatcaacgtgatcgaagaaattacggtgcataaagctgtagtagctttccggatgctctttcggcagaccgacatattcgtccatgttgaaggtgacaacgtgcttaaagctgacctggcctgctttatgcatttcgactaacgctttataggtggtcatcggcgtgccgccagtcggcaggcccagtacaaacggacgatcggcagtcggtttgaacgcattgatacgattgacgatatggcgagcagcccatttgccgacctgttcagcggtagtcagggggatcagtctcattattcacctcaataagtaaaatgtaagccgttggcggattaggcatctttaagcgtaacctggatttgcgcagacaggcgtcaatccgacctgattttttgaatgataaaataagttttctggtttagccagtaaaagggagtgataataacgatatttggtgacaaaactcacaaaagacacgcgtttaatttgcgatacgaattaaattttcacacactctgtagcagatgatctaacaatctgattacagaacatcggcagtacaatttgcagcaaaataaaaatacggcttgaaacgagccaaatagggttctcgtagggggaataagatgaatattttaggttttttccagcgactcggtagggcgttacagctccctatcgcggtgctgccggtggcggcactgttgctgcgattcggtcagccagatttacttaacgttgcgtttattgcccaggcgggcggtgcgatttttgataacctcgcattaatcttcgccatcggtgtggcatccagctggagcaaagacagcgctggtgcggcggcgctggcgggtgcggtaggttactttgtgttaaccaaagcgatggtgaccatcaacccagaaattaacatgggtgtactggcgggtatcattaccggtctggttggtggcgcagcctataaccgttggtccgatattaaactgccggacttcctgagcttcttcggcggcaaacgctttgtgccgattgccaccggattcttctgcctggtgctggcggccatttttggttacgtctggccgccggtacagcacgctatccatgcaggcggcgagtggatcgtttctgcgggcgcgctgggttccggtatctttggtttcatcaaccgtctgctgatcccaaccggtctgcatcaggtactgaacaccatcgcctggttccagattggtgaattcaccaacgcggcgggtacggttttccacggtgacattaaccgcttctatgccggtgacggcaccgcggggatgttcatgtccggcttcttcccgatcatgatgttcggtctgccgggtgcggcgctggcgatgtacttcgcagcaccgaaagagcgtcgtccgatggttggcggtatgctgctttctgttgctgttactgcgttcctgaccggtgtgactgagccgctggaattcctgttcatgttccttgctccgctgctgtacctcctgcacgcactgctgaccggtatcagcctgtttgtggcaacgctgctgggtatccacgcgggcttctctttctctgcgggggctatcgactacgcgttgatgtataacctgccggccgccagccagaacgtctggatgctgctggtgatgggcgttatcttcttcgctatctacttcgtggtgttcagtttggttatccgcatgttcaacctgaaaacgccgggtcgtgaagataaagaagacgagatcgttactgaagaagccaacagcaacactgaagaaggtctgactcaactggcaaccaactatattgctgcggttggcggcactgacaacctgaaagcgattgacgcctgtatcacccgtctgcgccttacagtggctgactctgcccgcgttaacgatacgatgtgtaaacgtctgggtgcttctggggtagtgaaactgaacaaacagactattcaggtgattgttggcgcgaaagcagaatccatcggcgatgcgatgaagaaagtcgttgcccgtggtccggtagccgctgcgagtgctgaagcaactccggcaactgccgcgcctgtagcaaaaccgcaggctgtaccaaacgcggtatctatcgcggagctggtaagcccgattaccggtgatgtcgtggcactggatcaggttcctgacgaagcattcgccagcaaagcggtgggtgacggtgtggcggtgaaaccgacagataaaatcgtcgtaagtccagccgcagggacaatcgtgaaaatcttcaacaccaaccacgcgttctgcctggaaaccgaaaaaggcgcggagatcgtcgtccatatgggtatcgacaccgtagcgctggaaggtaaaggctttaaacgtctggtggaagagggtgcgcaggtaagcgcagggcaaccgattctggaaatggatctggattacctgaacgctaacgcccgcagcatgattagcccggtggtttgcagcaatatcgacgatttcagtggcttgatcattaaagctcagggccatattgtggcgggtcaaacaccgctgtatgaaatcaaaaagtaatctgctttatgcctgatgcgacgcttgagcgtcgcatccaacaatgacaagcggtggagatcttctctgccgctttttttttcatcaatcatccccataatccttgttagattatcaattttaaaaaactaacagttgtcagcctgtcccgcttataagatcatacgccgttatacgttgtttacgctttgaggaatccacgatgagtgaggcagaagcccgcccgactaactttatccgtcagatcatcgatgaagatctggccagtggtaagcacaccacagtacacacccgtttcccgccggagccgaatggctatctgcatattggccatgcgaaatctatctgcctgaacttcgggatcgcccaggactataaaggccagtgcaacctgcgtttcgacgacactaacccggtaaaagaagatatcgagtatgttgagagcatcaaaaacgacgtagagtggttaggttttcactggtctggtaacgtccgttactcctccgattattttgatcagctccacgcctatgcgatcgaactgatcaataaaggcctggcgtacgttgatgaactgacgccggaacagatccgcgaataccgcggcaccctgacgcaaccgggtaaaaacagcccgtaccgcgaccgcagcgttgaagagaacctggcgctgttcgaaaaaatgcgtgccggtggttttgaagaaggtaaagcctgcctgcgtgcgaaaatcgacatggctagtccgtttatcgtgatgcgcgatccggtgctgtaccgtattaaatttgctgaacaccaccagactggcaacaagtggtgcatctacccgatgtacgacttcacccactgcatcagcgatgccctggaaggtattacgcactctctgtgtacgcttgagttccaggacaaccgtcgtctgtacgactgggtactggacaacatcacgattcctgttcacccgcgccagtatgagttcagccgcctgaatctggaatacaccgtgatgtccaagcgtaagttgaacctgctggtgaccgacaagcacgttgaaggctgggatgacccgcgtatgccgaccatttccggtctgcgtcgtcgtggttacactgcggcttctattcgtgagttctgcaaacgcatcggcgtgaccaagcaggacaacaccattgagatggcgagcctggaatcctgcatccgtgaagatctcaacgaaaatgcgccgcgcgcaatggcggttatcgatccggtgaaactggttatcgaaaactatcagggcgaaggcgaaatggttaccatgccgaaccatccgaacaaaccggaaatgggcagccgtcaggtgccgtttagcggtgagatttggattgatcgcgccgatttccgcgaagaagctaacaagcagtacaaacgtctggtgctgggtaaagaagtgcgtctgcgtaatgcttatgtgattaaggcagaacgcgtcgagaaagatgccgaaggtaatatcaccaccatcttctgtacttatgacgccgataccttaagcaaagatccggcagatggtcgtaaagtcaaaggtgttattcactgggtgagcgcggcacatgcgctgccggttgaaatccgtttgtatgaccgtctgttcagcgtgcctaacccaggtgctgcggatgatttcctgagcgtgattaacccggaaagcctggtgatcaaacagggctttgctgaaccgagcctgaaagatgcggttgcgggtaaagcattccagtttgagcgtgaaggttacttctgcctcgatagccgccattctacggcggaaaaaccggtatttaaccgcaccgttgggctgcgtgatacctgggcgaaagtaggcgagtaattttaagtttcgctatgccggatggggcgtttacgtcgcatccggcaaggaacagacaaacagtttcaaacgctaaattgcctgatgcgctacgcttatcaggcctacatgatctctgcaatatattgagtttgcgtgcttttgtaggccggataaggcgttcacgccgcatccggcaagaaacagcaaacaatccaaaacgccgcgttcagcggcgttttttctgcttttcttcgcgaattaattccgcttcgcaatttatccataaaataaatttaaaataacaaaacataattaaataaaatgtaaccgctttcatcttgctggaatttcacgcttttattcttctgcaagcctttcaaccgcaaacttaagccttgtaacaaaaatcatcaaaatatgtgcggttgctcatgttcttacattctggttacagaaagagattgataattcgcgtcgcgaaaaatagtctgttcctgtagtcagcgagacttttctcaacgctacttttttaatttttattttttcgctgttcacctttggtgcagcaatttatacgtcaaagaggattaacccatgcgtacgtttagtggcaaacgtagtacgctggcgctggctatcgccggtgttacagcaatgagcggctttatggcaatgccggaggctcgcgccgaaggattcatcgacgatagtaccttaaccggcggtatctattactggcagcgtgaacgcgaccgtaaagatgttaccgacggcgacaaatacaaaaccaacctttctcactccacctggaatgccaacctcgattttcagtccggttatgctgctgatatgttcggccttgatattgctgcgtttacggcgattgaaatggcggaaaacggcgacagctcccacccgaacgaaatcgcgtttagtaaaagtaataaagcctatgacgaagactggtccggcgacaaaagcggtataagcctgtataaagctgcggccaaatttaaatacggtccggtttgggcgagggcaggttacattcagccaactggtcaaacgctgttagcgccgcactggagctttatgccaggtacttatcagggggcggaagccggggcgaattttgattacggcgatgctggtgcgttgagtttctcctacatgtggaccaacgaatacaaagcgccgtggcatctggaaatggatgagttttatcagaacgataaaaccaccaaagttgattatctgcactcctttggggcgaaatacgacttcaaaaataacttcgtactggaagcggcatttggtcaggcggaagggtatatcgatcaatattttgccaaagccagctacaaatttgatatcgccggtagcccgttaaccaccagctaccagttctacggtacccgagataaagttgacgatcgcagcgtcaacgacctttatgacggcaccgcctggctgcaagcgttgacctttggttaccgggcggctgacgtagtggatttgcgcctcgaaggcacctgggttaaggctgacggtcagcagggatacttcctgcaacgtatgactccaacctacgcttccagtaacggtcgcctggatatctggtgggataaccgttctgacttcaacgccaacggcgaaaaagcggtcttcttcggtgcgatgtatgacctgaaaaactggaatcttccaggcttcgccatcggcgcttcctacgtttacgcatgggatgctaaacctgcgacctggcagagcaatccggatgcgtactacgacaaaaaccggactattgaagagtctgcctacagcctggatgcggtctataccattcaggacggtcgcgccaaaggcacgatgttcaaactgcatttcaccgaatacgacaaccactccgacatcccaagctggggcggtggttacggcaacatcttccaggatgagcgtgacgtgaaatttatggtaatcgcaccattcaccatcttctgatgcccgacgcggcaggttttgtgcctgccgcacgtttgaggaatttgctatgaaaaaactgattctcatcgccataatggcaagcgggctggtagcttgtgcgcaaagtaccgcgccacaggaagacagtcgtctgaaagaggcatacagcgcctgtatcaacaccgcacaaggtagcccagaaaaaattgaagcctgccagagcgtgttaaacgtgctgaagaaagagaaacaacatcagcagtttgccgaccaggaaagtgtacgcgtactggattatcagcagtgtctgcgtgcaacgcaaaccggaaatgatcaggcggtgaaagccgattgtgataaagtctggcaggaaatacgcagtaataacaaataagtgagagctgtaactctcgcttttcttatttcccttgcataaaaaagccaacccgcaggttggcttttctcgttcaggctggcttatttgccttcgtgcgcatgttcatcttcgcggcaatcgccttcggcacagtgaccgtaaagatagagactgtggttagtcaggcgaatgccatgttttgcggcaatttcacgctgacgcgcttcgatggaatcatcactaaattcgataaccttgccgcagtcgaggcagatcaggtgatcgtggtgatgttgctgtgtcagttcaaatacggatttaccgccttcaaaattgtggcgggtgacgataccagcgtcgtcaaactggttcagtacgcgatataccgtagccagaccaatttcttcacccatatcgatcagacgtttgtataaatcttccgcactgacgtgatggttgtccggctcctgaagaacttccaggatttttaaacgaggaagcgttactttcaggccagctttctttagggcggtattgttatcagtcatgcggaatctgtcctgttactaagcggttcacttcattagaagaagtgacagaatttgctcttgagataatgcgtatcattatagaattgccacgcctaaatgaaaaccacaagtccctggcaaatattgttaataaaaacgtggcacagcttacatttacaacggcaaggccacttgaacaccgggacattgtacaggtacaacagcaaaagttacaaatttgtagcaattattttgattggcattatctattaatacggcgtagacatgagtctacgccgcatcacatcaggcattgagaatttcgtcgagatgcaactcttcagaaatctgtttaacccatttttctacacgttcagcggtcagttccggctgacggtcttcgtcgatagccagaccgacaaagtggtcgtcatctgccagacctttacttgcttcgaaatgatagcccgcagttggccagtgaccaacgatggttgcaccgcgcggttcaatgatgtcgcggatggtgcccaatgcgtcgcagaaatattcggcgtaatcttcctggtcaccacaaccaaacagcgcaaccagtttgccgttgaaatcaatctcttcgagagtcgggaagaagtcatcccagtcacactgcgcttcgccgtaataccaggttgggatgcccagcagcagaatgtcataagcttccagatcttctttgctgctttttgcaatgtcatggacatcggcaacgtctttaccaagctgtttttgaatcatttttgcgatattttcggtattaccggtgtcgctgccgaaaaagatgccagtgatagccatgagtgaaataacctcttgaaacttattgaaatgggggtggaaaattgcccacggataaaggcaatcatagcagaacaggcagtcttgcggaatcagcaaacgagcaggactgcacactgtgctacatgaaagtggaaatttaaacgatgccctgactacgcagcgccgccagttgctgcattaacatctcttcgatcagttcgctacggctcatattgcggctctccgccagctcgttcagcgcctcgacagcttccgcgttcagcttcagttcgacacgcttaaggccacgtactttgtcgcgttttagctggttgcgtttattaatacgcagctgttcatcgcggctaagcggattagttttcggtcgtcccggtcgacgctcgtgcgcgaacagatctaatgtcgtacggtccgtttgttctttggccatgatcttggtgacttcgggggaaacaatcagccaggcctctgcccggatggatagcgcgccataatacatcagcgcgatgagtcacgccaacgcccacgcgcggaaagcgacgcggacgctgggtttttaatcagttgcgttaatcattgagatagcgacggatagcgcgtaataccgcatccggtttttcagcatggacccagtgacccgcgcctgcaatcacatgcgcccgtgcctgtggaaattgagccagtaaatcatcacggtactgctcgctaacatacggagaattgccgccagggataaacagggcagggtgatcccatgccgggattttctcccaacctacaatatgcggatactgatcccacaataccggcacgttaaagcgccactccccgtcaacaaaagatttcagcagaaactgaatcaccccttcttcattaagatgctggcgcattattgctgctgcttgctggcgagtttgtgcgtcgctttcactgaccgcgttgatagccgcaaaaatctcatcatgacggcgtacgtgatagtcgaccggcgcgatatcgatcgccaccagtttatcgatgcgatcggaggctagtgcagtaagtgccattaccgctttaccgcccatggagtgaccgataaatgttgctttgtcgatctgctgtgcatccagagtatcaacaagatcctgcgccatcgccgggtaattcattaccggatctctcggactaagaccgtggttacgcatatcaacctggatgatattgtgatcgtttaccagatcgcgagccagtacgccaaggttgtcgaggctgccaaacagaccgtggacaagaacgatgggagaattattgtgctggttttgtgcagtttgcgcgcggatattcaatttcatggcaaagttctttttttcgcgttgtcgggttagggtattatgttgaccattgtgccacagggctgcaacaaataaggtttattccgagtttttctgcaagccaggcttgacgctatccgctgccgggatttattcatatactcctggcgacttgtattcagctaagacactgcactggattaagatgaaaacgattgaagttgatgatgaactctacagctatattgccagccacactaagcatatcggcgagagcgcatccgacattttacggcgtatgttgaaattttccgccgcaagtcagcctgctgctccggtgacgaaagaggttcgcgttgcgagtcctgctatcgtcgaagcgaagccggtcaaaacgattaaagacaaggttcgcgcaatgcgtgaacttctgcttagcgatgaatacgcagagcaaaagcgagcggtcaatcgctttatgctgctgttgtctacactatattctcttgacgcccaggcgtttgccgaagcaacggaaagcttgcacggtcgtacacgcgtttactttgcggcagatgaacaaacgctgctgaaaaatggtaatcagaccaagccgaaacatgtgccaggcacgccgtattgggtgatcaccaacaccaacaccggccgtaaatgcagcatgatcgaacacatcatgcagagcatgcaattcccggcggaattgattgagaaggtttgcggaactatctaaaacgttgcagacaaaggacaaagcaatggcaatccacaatcgtgcaggccaacctgcacaacagagtgatttgattaacgtcgcccaactgacggcgcaatattatgtactgaaaccagaagcagggaatgcggagcacgcggtgaaattcggtacttccggtcaccgtggcagtgcagcgcgccacagctttaacgagccgcacattctggcgatcgctcaggcaattgctgaagaacgtgcgaaaaacggcatcactggcccttgctatgtgggtaaagatactcacgccctgtccgaacctgcattcatttccgttctggaagtgctggcagcgaacggcgttgatgtcattgtgcaggaaaacaatggcttcaccccgacgcctgccgtttccaatgccatcctggttcacaataaaaaaggtggcccgctggcagacggtatcgtgattacaccgtcccataacccgccggaagatggtggaatcaaatacaatccgccaaatggtggcccggctgataccaacgtcactaaagtggtggaagacagggccaacgcactgctggccgatggcctgaaaggcgtgaagcgtatctccctcgacgaagcgatggcatccggtcatgtgaaagagcaggatctggtgcagccgttcgtggaaggtctggccgatatcgttgatatggccgcgattcagaaagcgggcctgacgctgggcgttgatccgctgggcggttccggtatcgaatactggaagcgtattggcgagtattacaacctcaacctgactatcgttaacgatcaggtcgatcaaaccttccgctttatgcaccttgataaagacggcgcgatccgtatggactgctcctccgagtgtgcgatggcgggcctgctggcactgcgtgataagttcgatctggcgtttgctaacgacccggattatgaccgtcacggtatcgtcactccggcaggtttgatgaatccgaaccactacctggcggtggcaatcaattacctgttccagcatcgtccgcagtggggcaaagatgttgccgtcggtaaaacgctggttagttctgcgatgatcgaccgtgtggtcaacgacttgggccgtaaactggtagaagtcccggtaggtttcaaatggtttgtcgatggtctgttcgacggcagcttcggctttggcggcgaagagagtgcaggggcttccttcctgcgtttcgacggcacgccgtggtccaccgacaaagacggcatcatcatgtgtctgctggcggcggaaatcaccgctgtcaccggtaagaacccgcaggaacactacaacgaactggcaaaacgctttggtgcgccgagctacaaccgtttgcaggcagctgcgacttccgcacaaaaagcggcgctgtctaagctgtctccggaaatggtgagcgccagcaccctggcaggtgacccgatcaccgcgcgcctgactgctgctccgggcaacggtgcttctattggcggtctgaaagtgatgactgacaacggctggttcgccgcgcgtccgagtggcacggaagacgcatataagatctactgcgaaagcttcctcggtgaagaacatcgcaagcagattgagaaagaagcggttgagattgttagcgaagttctgaaaaacgcgtaaacacatttaataaaaaaagggcggtcgcaagatcgcccttttttacgtatgacaaacacagaattgcctgatgcgctacgcttatcaggcctacgaggatggtgcaatatattgaatttaagcgattttgtaggccggataaggcgttcacgccgcatccggcaaaaacaacgaacactttgtcaacaaactgagtagctcaaggaaatcccaatgaagaccaacaggagtctggtcgtcatagtgagtctaattaccgccacattactgctgactgcatgcgcccaacctgaacaaagtagtttagctggcgactggttactgacccctaaagataaaaccagaggattaacgggtagcattgcggtaaatattgcacctttccggtgtaagacaaattgccgtggtgataacttacctgataatacccgccgctggcagttgagtggcgggaacgaaaaagaacttacttatcttcataatatgagtgcacaagaaaaggtcggtttaaatcccggttggcaatgctacaccagtttttttatgcgggtttgccagggcaagcccggcactcgaccgatagtcaatgaggattatgtcagcgaaagcggattttttggcagcatgatgcatgtcgggattattgagttacgacgctgccagagtgaaaattgccagcaagaattgaaagcgataaatacacattaaaatagtgagtccgggaatgaaacccggacctgaacatgtcttattgcgtgaatgtttctttcatttgatactgcatttcccagagttcagtaaggctaataacttttcttgttcttgcttcttcactttgtacccataagaaagggtagaacgtgaaggcttccgttgcgcttaattttattacgtcttctcgccattgctgccatcgtacattttcatagaaggtatctaaatcaccggataatgcccactgaagaaactcagaatatccaacttccagactttcccaattcagcgtatctggcgcaaaataataaacgcagccagtatcttccccaagatcgccaccattaagagcaaaaattacccctgcgacatcgtcagcgatgggtaaagcccgcacgcctgcgaattcagggcgttgtgtccaacttactggatctcgtggcaaccgggggtgaccagatcctgctatgcgtaattaaccattatcaatcagcagacctccggagccatagacaagcgcacccatcggactttttgttgtcacctgtaattgataaagtgcggtttcggctaaatctttattaaccggtaagagttcggtatggtttgtggcgtcttttaaccagttctggattattggccaggcactatcttcagtatttactaactgattcatttcacgcatcgctacttgctccttgtgtgctacggtgtcatttatgatgaggaattgtatggaacattttttaaatattaagttccttatatttgaataaaaaatgactttatccatacattgccacttttttcaaagcataaaccgatacccaataccggtttcagtaataaaatggcgaggccgggccggatcctgttccagtttttgtcgcagatgccccatataattacgcaaatagttgctgtgttcgatcgcgtttagaccctacatctgccggatgcggcataaataacgaactatttgccaacaaacagaaagggcgatcattcaatcgcccttttttactttgttttattaaccgtgtttatttttcagttcaaagcgtggacttaccagaccatacagtgtccaaccaaggaaggtcacgatggaaccgtacagcatggcttcttccccggaactgtacagcgcataaaagctatacatcgcgccaacaaaagcaacaaagtttgcaactttcgctttactggggggcacattagcgaccttctgaataatgactaatgccgccatactcagaatatacggaatgatattggtcaccacggccaggttaaccagcacgttgaactgactgtttaggctcgggctaatggtcatcagtgccaatccactctgaataatcacaatggtcaacattccctgcaccggtgcatccactttggttacacgggagaaaattttagggaagtagccttcatcagaactagatttaaacacctgggcaatggtgaactgccagccaagtaggctaccgcagcaggacatcaccatcagcgccataatgactttacccacttccggcgtgaacatctgcgcgaaggccagaccaaatggtgccgtactatttgccagctccatatttggcacaatcccggcaatcacgttggtggagacgatataaatcaccgccgcacctaacgtaccgccgagtaccgcgattggcacattacgttccgggttttccactacatcagtattcgcacacgcagactccagaccaagaaaagcccacagcgtcatagcgatggaagaacctaccgcactgaagaacggtgcatgatgcggattccaggaatcaacgtacagcgtcgggctaaaccagaaccagccaataatgcacagaccgacgaccggaataatgaccccccacacggtaatgctactgatttgcccggtaatgcgcgcaccaccaaagttagccacggtacaaatccacagcaccccgatggtcgcaagaccaatctgcactgggctcaaactcgcgccgagcagttcggtgccgtaaccaaccgcgctaatagcaatcgcgacgttagcaatcagcagactgacgccgtaggtatagttcgccataaagttaccggatttaccgaaagcatactcggcataaccgcccataccgccacttttacggctgaacataccgcattttgcgaatgcccatgccagtgccatactgcctacggctgtcaccagccaggagataatactgattgtcccgacttcggcaagctttgtcggcagcatgatgataccggagcccatcatgttgaccatcgtcagtatggttaactgaacgacgcccattttgttgcttttagcctgactcataatttttcccctttcaacagggtgctttgcgcatcacgaggcttgatgacatagcaccaaacttgcttacgaccatcatgttcttcgatatagacaccctgcagctccggtgcaaaacctggcagcaggttgatcccttcttccagagcgctgaagtaacgcagaacagcaccaccccagatttcacccggaacaacacacagcacacccggaggataaggaagcgcaccttcggcagcgatacggccttctgcatccggcagacgaaccagttccacttcaccgcgtaaataggcgtagttggcttcttgcggattcatgctgacgcgtgggaagtgctccttacggaacatctctttttgcagttgtttcacgttgtggcgggcatacaaatcatgcatttcctgacacaactgacgcagggtataaccggcgtagcgctcttcatgctgtttgtagatggaaggtagcacttctgctaatggcgcgtcggactcaagcagtttttcgaagcgtaccagcagggcaacaagttgctgaagtttggccatatcttctgccggagtcagcaggaagaggatggagttaagatcgcatttttccggcactacgccattttcgcgcaggaagttagcaagaatcgtcgcgggtacaccgaacgcttcatattcgccgttacgtgcatcaatacctggggttgtcagcaacagtttgcatggatcgacaaagtattgattctctgcatagccttcaaaagaatgccagtgttcccctggtacaaactggaagaagcgcagatcaaccgcaatttgcgctgtttcatagctctgccagggtttaccatccaccagttcaggtacgaacggacgaatatgctgacagttatcgaggatcagtttgcgggcattaatgccatttaccacacaatccatccacatattacgaccgctgacaccttcatgcattttggcgttgatattcagtgcggcaaacagcggatagaacgggctggtggaggcgtgcatcataaaggcgttgttcatgcgtttgtgcggtacataacgctgttgccctttgatgtggctgtcttttttatgaatttgactagtctgagaaaaaccagcctgttgtttatgcacagattgcgtaaccagaatacccggatcgttctcattaagatccagcaacagcgggctacagtccgccatcatcggaataaactgttcatagccgacccatgcactgtcaaacaggatgtagtcacacagatgaccaattttatccaccacttggcgggcgttataaatcgtaccgtcgtaggtgcctaactgaatcacagcgaggcggaaaggacgagcctcttttgcccgctgcggtgcgacttccgcgatcagctcacgcaggtaactttcttcaaaacagtgcgcatcaatgccaccgataaagccatacgggttacgtgccgtttccagataaaccggtgttgcaccagcctgtagcaacgctccgtggtggttagatttgtggttattgcgatcaaacagcaccagatcacccggtgttagcagggcgtttaaaaccactttgttagaagaactagtgccatttaaaacgaagtaggttttatcggcattaaacacttttgccgcatgttgctgtgcaatgcatggcgcgccttcgtgaatcagcagatcgcccatcgctacgtcggcgttgcacaagtcggcacggaacagcgcctcaccaaagtattccacaaactgattccccgccggatggcgacggaaaaattcgccgccctgatgaccagggcaatcaaacgcgctgttaccttgattgacataatcgaccagtgcgcggaagaaaggtgggcgcagttgagtttcataatggctggcagcggtttctaactggcgaccataaaattctcgtcggctttcgcaattctcaaagacaccgctaatacggggcaaatactctgcgggtacacgttcttgattttcagtagcaataaataccgggatgccataacccgtggcatcgatttcatcgagttttccgcatgtaacatcgttgaggcttaaaactattgccgccacatcgatattacgactttcattaatgtagatacattctcgctgcgtggtaaaacagtccgggcaagaatcactaaccgcaatttttaatttactcatttttcatctctttattttaggtaatagcaggtcctcaatttctcgaatgagaaatcgatcgtgccggaaaaaagcaaagttaccccgctgataaataaatcaggtagattgcttttttcagaatgcagaaacccttaccagtcaggtggctgataatacaagggttaacagagaatgagcactgcggaatacaggcatatgcctgtaatacagagagtcaggaagacctgtacgctgaagtgcccttagtcggtagactaacgggcattgaagaagtgaaagtcgaagctattgcgatgagcaaacttcataatatgagttgtccgccttatatggggcatagtgcggctgttattttccatttaatttacctttcctgatgtgaatgaaggtgaagatattctatccaggaaatacggttgaactgtgaaggtgatcaataaaaaatgatcaatcttaatttatttaatgatgagctttttactcagtaatataaaatattgaattgttatttttgtgtgttgtttaagataaaaagccgtatttattattacggctttaattaataaaaggcaggctgtattaaaattaatattcaaagcataaaccgatagccaataccggtttcagtaatgaaatggcgtgggcgggcgggatcctgttccagtttttgtcgcagatgtcccatataaatacgcaaatagtgactgtgttcgaccgcgtttggcccccacacctggttaaggagctggcgctgggtgagtacttttccggcattgttgagcagcaccgccagcaggcggaactcaattggtgtgagatgcacctcttcctcaccccggtgaatcacgcgggcggctaaatcgacggtaacatcggaaaattttaccagcggatcgggcgcggtggtggcagagtggcggcgtaatgcgacgcgcagacgggcctgcaattcgccaatgccaaacggcttactcagataatcatccgctccggcatccagcgcggcgattttgtcgctctcttcgctgcgtgcggaaagcacaatcaccggcaccgcgctccactggcgcaggtcgcggataaactcaatcccatcaccatcgggcaggccgagatcgagaataatcaaatctggcttacgggttgccgcttccagcaagccgcgttgcagcgtttcggcctcaaagacgcgcatcccgtcgccctccagcgccgtgcgcagaaagcgacgaatagcctgttcatcttcaacaatcagaacgtttgtcacatatcctcatgaaattcttcaagttcaggggcagtttgctggggaagtgtaacacgaaaacaggcaccaccttccggtcggttgaacgcggtaatagtgcccccgtgtacatccactatcgcccgacaaattgccagtccaagccctacccccggtactgcgctctctttattcccgcgagcaaacttatcaaatatcgtctgctcctggcctggcggaagaccggggccgttatcccagacatccagttgtagattttcgccctcaacgtgggcatcgataccaatttcggcctgcgcacccgcatatttcaccgcgttctccagcagattaatcagcacccgttcaaagagtggcccgtcaacgtggattaaggtcagcggttctggcagagaaagattgatggggctgcttaaacccggttccagcatttgcagcgcgctgccgactacttcttccagcgttaaccactctttcttcaaattaaagccgccggactgaattcgcgccatatccagtagattattcaccagtcgggtagtgttcagcacatgctgacggatctcgctggcctggcgggcgtggggacttccttcgcttgccagatcgagcgttaagatttctgcctgaccaaacagcaccgtaagcggcgtgcgtaaatcatggctaagcgccgccagcagggcgttgcggatctgttcacgttcgcttgccatccgcgcctgttcttcgctggcggttagcgtcagccgctcaagggcattggcgactaacagcgtaaacgtctccagcaggcgctgctgttccgggatcatcaactggcgcagattccccggctccaccaccaccagcccgtaggttttctcgccgctttttagcggcaaaatctggtacggtacaccgggtaacgtgtcggtgcccgcgcccgcaggcaggcctttatcaaaactccactgcgcgatggcatcgtcccacggcgtcattccttgcggatgtgttaacggctgcaatttaccgttgtcatcgggcaacaacacctgactgcgggcatgaaacgtggaggcaataaattgttcgctggtggcagcgatatcctgcggactgcggcccaccgccagagctttgctcatttcatataagtgccgtgtgcgttgctcgcggtaacgggctacccgcgcctgataacgcacgccagcagtaaggttcccgatcaccagcccgacggttaacatcaccgcgaaggtcagcagatattacacatcagagacggcgagcgtgccgcgtggggcgataaaaaagagatcgaaactcactacattaatgacggtggcaaccacactaggccagcgtccataaaatagcgccaccaccaccacgccaagcagatacagcatcaccaggttggcggcatcaaacgccatcagccactgcatggcaattaaggtgataacggcgcataacgcggcggcaaccacgcatccctgaatttgtacacgccacttgtctttaaaagagcggttatccggcgcgttgttaatcgtgcgggcgggtggttcatcaagcgcgaccagcacctgatcgagatcgggggcgatgcgcgccagtcggtcagcaaacgtttcccgacgccaccagcggcggctggccgggcgaccgagaataatcttgccgagattatgttcacgggcataacgcactaccgctttctcttccgctggatcagaaagtgttgccgtctccgcgcccagttcctgcgccagacgtaaggcgctgagaattgcccgacgttttttttccggtaagcggtgcagggcaggggtttcaacatacaccgcgtgccagacgctacccagccgactcgccagccgcgccgctgcgcggaccagtttttcgctgccggtgttatggccgatgcataaaaggatcgcgtcgcgcgtgcgccacactttctcttcgccaggatgcccccgccaggcgcgcatttgctcatcaacgcgatcggcagtacggcgcagtgccagttcgcgcagggcgatcagattacctttgcggaaaaaatgttcaatggcgcgctccgcctgcccggcaatatagactttgccttctttcagccgctggcgcagatcgtccgggggcaagtccaccagcaccacgtcgtcggcggcatcgaaaaaaggatcgggcacggtttcccgtacctgaattccggtgacgccgctgaccacatcattcagactttccagatgctgaacgttgacggtagtgaaaacatcaatgccagcttccagcagttcttcgatatcctgccagcgtttgggatgacgggaacctggcgcattactgtgcgccagttcgtccattaagatcagcgccgggcggcgggcgagggcggcatcgagatcaaactcgctgatatgccgcccacggtacgcctggcgttttaacggcagaacagccagcccttccagcatggcggcggtatcttttcgcccgtgggtttctaccacgccaaccacaatatccagcccttgcgcccgcagtcgctgggcttctgccagcatcgcccaggtcttcccgacgcctgcacaggcaccgaagaaaactttcagcttcccccgatgcggcgcggcagtttgttccagcagacgatcggggtcgggacgtaagggttcgttattcatcaagtttatccagcgccagattgagttcaacaatgttgacaaccggctggccgatatatttcaccagcggttgttggctgtattttgcgatcagttgcgtgagctgttcaacgctgagattacgcgctttcgccacgcgtgggatttgccaggccgccgcttgcggggtgatattattgtccagcccgcttgcgcttgccgtcaccagttcaaccggaacgctcgcgctggcatccgggttagcggcccgtaatgcagcaacgcgtgcggctattagtttatccagctcagggttactgaccgccagattgctcccgccagaagcctgtggattatagggcatttctgccgttgcgctcgggcgaccatgaaaatagccgttgccggtaaaattctgcccgattaatgcgctaccgcgcaccgtatcaccttcacgaatcaagctaccattggcctgccagggaaaccaccattgccccagtacggtggtcagcagcgggtaaacgccgccagtaatcaataacagaaagataaatgtacttaatgccggacgtaatccactcatggtaaacctcacaccagaccgcaaacggtcagcagtaaatcaatgactttgataccgataaacggcaccagcagcccacccagaccgtaaatccataagttacggcgcaacatggcagaagcggtaagcggtttataactcacgccttttaacgccaggggaatcaaaaagacgataatcaaggcgttgaaaatcaccgcactgaggattgcggagtcggggctatgcaggcacatgatgttcagcgcatttaactgcggatacgttgccgcgaatgccgccggaataatggcgaagtatttcgccacatcgttggcaatgctgaaggtggtcaggctgccacgggtcatcagcatctgtttgccaatgtgcaccacctcgatcaacttggtcgggttagagtcgagatcgaccatattgcccgcctctttcgccgcctgggtgccggagttcatcgccaccgcgacatctgcctgcgccagcgccggagcatcgttggtgccgtcgccggtcatcgctaccaaacgaccttccgcctgatactgacggatcaatgccagcttggcctccggtgtcgcttcggcgagaaaatcatcgacacccgcttccgcagcaatcgcggcggcagtcagacggttatcgccggtaatcatcaccgttttaatgcccattttgcgcagctgggcgaagcgctctttaataccgcctttgacgatatctttcagcgcaataacgcccagcacacgagaaccttccaccaccaccagcggcgtggctccctgacgcgcaacctgatcgactttttgatcaacatcggtagggaagtgaccaccgttagcctcaacatggcgacgaatggcatcgacagaacctttacggatcatgcggttgtcgatgttgatcccgctcatccggctttgcgcagtaaacggtacaaaggtggcatggaggctctgcacatcgcgctcgcgcaggttaaaacgctgcttggcgaggatcacaatactgcggccttccggcgtttcatcagccaggctagccagttgtgcggcgtcagccagcgttttttcatccacgccctgcgcggggataaactcgctcgcctgacggttaccgagtgtgatggtgccggttttatccagtagcagaacgtcaacgtcacctgccgcttcaactgcacgtccgctggtggcaatcacattcgcgcctagcatccggctcatcccggcgacgccgatcgcactcaacaggccgccaatagtggttgggatcagacagaccagcagcgccaccagtaccgttacgctgactgcattaccgccccacgcggaaaacggccacagcgtggcggttgccagtaaaaagacgatagtcagggcaatcagcagaatggtcagggcaatttcgttcggcgttttgcgtcgctgtgcgccttccaccatcgcgaacatccgatccagaaatgtctcgccggggttaacgctacactcaatcaccagccagtcagaaagaatacgcgtgccgccggtgacggaggcaaaatcgccgccggattcacggatcaccggtgcgctttccccggtgatggcgctttcatcgacgcttgcacccccttcaataacttcaccatcgcaggggataatatcgccagcttctaccagtacgatatcgcctttacgaagttggtcggcaggaactttgtccgccgcagcgccatatttcggctcacgcagcttgcgggcaaaggcagtttttttcacccctttcagactgttggcctgcgctttactgcggccttctgccagcgcctcggcgaaattagcgaacagtacggtgatccacagccaaccgctaatggccgcgctaaacagcgcattgccgggcatcgcaccgcttgccatcgcgatgctaatacaggtggtcagcagactgccgatccagacgataaacatcaccggattgcgccattgcgcctgcgggtttaattttttcaccgcttctttcagcgcctgaacgacaagtgttggttcgaatagcgccagttgtttacgactcatattcagtgctcactcaatatcatcaggagagatattccgccaccggaccaagcgccagggcagggataaaggtcagtgcgccaaccagcaacacggtgccgattaacaggccaacaaacagcgggccgtgcgttggcagcgtgccggagctggcggcttggctctttttactcaccaggctaccggcaattgccatcaccgggataatcaccccgaagcgaccgacaaacatgcagaacgccagtaaacagttccagaacggagagttggcgcttaatccggcaaaggcgctgccgttgttgttagcggcggaactcacggcgtacagcacttcgctaaaaccatgcgggccagggttgagcatggcgctacgtccggcgtcggtcatcatcgccaacgccgcgcccatcagcaccagcgtcggggtaaccagaattgccagtgcagtcagtttcatctcgcgtacgtcgatttttttacccagatattccggtgtacgaccaatcatcagcccggcaataaacaccgccagcaggacaaacagcatcatgccgtaaagaccagaaccgacaccgccgaacaccacttcaccaatttgcatcagccacatcggcaccatgccaccgagagcggtaaagctatcatgcatcgcaatcaccgcgccacaggaagccgccgtcgtcacgaccgcaaacaggctactgaccagcacgccgaaacggctctctttaccttccatattgatgctgctgtccgtgcccagtgccagcagatgaggattaccctgaacttctgcccacatcaccacgcctacgcagatgacaaaaatcacactcatcgcccacagcaacatgcgcccctggcggcgatcgcccatcacttcaccaaaggcaaagcacagcgccgttgggatcaagaagatcgccagcatctgcacgaagttggtcagtgcggttgggttttcaaacggatggctgctgttggcattaaagaagccaccgccgttagtaccgagcatcttgatcgcttcctgagaagctacaggccccatgggtaacagctgttgcgctccttcaacggtattcacagcctgataaggcagaaagttttgcagcgcaccttgttgaataaaaaacagtgcaatcaacaacgccacagggactagcacccataacgtgatgcgtagcagatcgacccaggcattcccgagcgtgctcatgctctggcgggtaaacgcacggatgagggcaaaaatcaccgcaatcccgctggcggcagaaagaaagttttgcaccgttaagcccgccatctggctgaaatagctcaacgtggtttcaccgctataagattgccagttggtattggtgacaaagctgacggcggtattcagcgccagatcccagctcagccctggcaactgctgtggattaagcggcagatagtgctgaccgagcaacataaaaaacagcaccgccagccccagcatgttcaggccgagaatggcacaaagatattgcttccagttcatctcacggtcagagacgccaagtgcgcgaaaaagtacgcgctcaacgcccgttgtaccgggaagaggaatgtcattaatcagccgcgccagcccgctgcctaaaggacgcgccagcaccattaacaccagtaaaaacgtggcgatcagtaagaacccttgcgcagccatcagaacgcctccgcattgatcagggcataaaccagataacccagtaataaaaacaccagcaatacgccggttatcacgcctgcactcacagtgcacctccagtggcctaaaagtgataccggaagggtagaattctggctgcaaagatttcgcaaaaatctgcgggcggggtgtaaaaaaagtataaaaatggcaaaagccatgatttaactaatgtttagtattaatttaacttttgtgtaacttaattacaggatgaatgtaaataaaccatcaataagcaaaaataagtggtcggatgagtagtaaaattacacaaaaggcggtactattttcatcagataaacaaattcatttttccggtgccattcaccgggtagatacaaaagggggagaaaagtatggaactctacagagaatatcctgcatggcttatctttttacgccgtacttatgcggttgcagcgggcgttctggcgctgcctttcatgcttttctggaaagaccgcgcccgcttttacagctacctgcatcgcgtctggagcaaaaccagcgataaaccggtgtggatggatcaggccgaaaaggcaactggtgatttttattgattgctgagttttgaatacattgaacgtctacacttactcctgtaaaccgctcaggagcagtaatgaatctacaacgatttgatgacagcaccctaatccgtatctttgcccttcatgagttacatcgactgaaagaacatggcttaacgcgcggggcgcttctcgattatcacagccgctataaactcgtctttctggcgcattctcagccggagtaccgcaaacttggcccgttcgtggctgatattcaccagtggcaaaatctggatgactattacaaccagtaccgccaacgcgtagttgttttgctttctcaccccgccaacccgcgcgatcacaccaatgttttgatgcacgttcagggttattttcgcccgcatattgattccacagaacgccagcagctggctgcgcttatcgacagttatcgccgtggcgagcaaccacttcttgcgccgctgatgcgtatcaaacactatatggcgctttatcctgacgcctggcttagtgggcagcgttatttcgaactttggccgcgtgtgattaacttgcgccatagtggagttttatgactacccatctggtctggtttcgccaggatttacgtctgcacgataatctcgcactggctgccgcctgccgcaatagctctgcacgcgtgctggcgttgtatatcgctacaccacgccagtgggcgacgcataacatgagcccgcgtcaggctgaacttatcaatgctcaactgaatgggctacaaatagcgcttgcggaaaaaggtattcctttattgttccgtgaagtggatgactttgtcgccagtgtcgaaatagttaaacaggtgtgcgcggaaaacagcgttacccacctgttttataactatcagtatgaagtgaatgagcgggcgcgggatgtggaagttgaaagagcgctgcgtaacgtggtgtgtgaaggatttgatgacagcgtgatcctgccgcctggcgcggtgatgaccggtaatcacgagatgtacaaagtctttacgccttttaagaatgcctggctgaaacggctgcgggaagggatgccggagtgcgtcgctgcgccaaaagttcgtagtagcggaagcatagagcccagcccatccattacgctgaattatcctcgtcagtctttcgatactgcgcattttccggtggaagaaaaagcggcgattgcgcaattacgccagttttgccagaacggtgccggagaatatgagcaacaacgagattttccggcagtggaaggcaccagccgtttgagcgccagcctggcaacgggcgggttaagccctcgccagtgcttgcatcgcttgttggctgaacagccgcaggcgctggacggtggggccggtagtgtctggcttaatgagctgatctggcgcgagttttaccgtcacctgataacgtatcaccccagcttgtgtaaacatcgtccatttattgcctggacggatcgtgtacagtggcagagcaatcccgcacatttacaggcctggcaggaaggcaaaacgggatacccgattgttgatgccgctatgcgtcagcttaacagcactggctggatgcataacaggctacggatgattacagccagttttctggtgaaagatttattgatcgactggcgcgaaggcgagcgatatttcatgagccagctgattgatggtgatttggcagccaataacggtggctggcagtgggccgctagtaccggaaccgatgcagcgccgtattttcgtattttcaacccgacaacccagggcgagaaatttgatcatgagggcgagtttatccgccagtggctaccggaactgcgcgatgtgccagggaaagtggtgcatgagccgtggaagtgggcgcagaaagcaggtgtgacgctggattatccgcaaccgatagtcgagcacaaagaagcgagagtacaaacgttggcagcgtatgaggcggcgcggaaggggaaataacagacgcgtcaggcaatcgagcccagatgccggatgcggcgtgaacgccttatccagcctacaaatttgtgcaaattcaataaattgcaggaaatacgtaggcctgataagacgcgtcaagcgtcgcatcaggcatcggtgctggcctattaagactccagcgccagcgcgcggtttctgaatttcagcgcctgatacagccaaatcatcagtaccagtcctacacacgccagtgcgccccaggtaatttgatcaaatacttcaatatatgcattgatggagtagttgatcgccccggaagcatcaaagctagcctggcttgtctgatcggcaatcacgcccgccagatagttcgcgatcgcgccagaaagcagcatgtagatgccggttaatacgccggtcacaccggggatttcaatgcgcgtaatttggctcatggcaaccgggtcgataaacagttccgcaaagcccatcaccgccaggcctaataccatcagtggcagagaagagtgaccatacattgcggaccagcgggcgcttaaggtcagaatgcagaatccggcgctcatcaggccaaggccaagagcaaatttcccccagatgcgcacggtacgattacccgcgacactctcttttaccacccacgccaggaacacaccgcacagcataactgcgaaggcattaatgctctggaacatcgcggtcggaacggtataaccaaacatatcgcggttaacgaagcggtcgatataaaggctaatgctgctaccgccctgttgtgcgaaggcccagaacaacatactgaagaaggtgagcgtcacaatcagccccagctccttccgctgtttctggttttctgctttgcgataaatttttgccagtacacccaggccaataatagtcgcgacaattaaggcgtatacgctccactctttccagaacagtatggtaatcagtgcaggcgttgccaccagcagaaccagcagccatccccagttcggcaggagaaagtttgtcgcacgcagtacttttttgttaacgccgcgggtatgagtgaaatgacgattgccacataagaaaatgaccagacccgcgatcatgccaaccgccgccaggccaaagcccatcgcccagctgtactcttcctgggcgtaaccacaggcgataggtgcgataatagaccccacgttacccgccgcatacatcaggctgaaaccgccatcacgacgcggatcggttggctcatacagctcgccgagcagacagcttacgttagatttaaacaggccatagccgcagacgataatcgccagggacagatagaggaaactcggatggatctcactggcacccagcaccacatgaccgatcgccatcaacaacgcccccagcatcaccgccatgcgattgccgagaactttatccgccaaaaagccaccgaggattggcgtgacatacaccaggctacagtaggcgctaaataactcgtaggcgtgagtatcgttgtattttagttgattggtgagatagagaatcagcagggcacgcatgccgtaaaagctaaaatattcccagatttgcagcgcaacgacatagtaaatagcgcgcggctgacttgcgtgtttattcataataattccacaattgacggcaacgtcacgtaatagttgcgcggcgtgcttgtgtttccttaaagttaaaactttgatacagatctgattatttatgcaatatgctgtctgattgcataaatatacattagctgaagcgtgatgatataaacaatttgcgtcttttggcgtcgggtttgtttcttaatatgtcaaaagattggctatcgacgaactggcgaggtaacgctatgttaacggtgtagctatcagaatacggaaggcgcgaagatgaaaaacaccgaactggaacaactgattaacgaaaaactgaacagcgcggcgattagtgattacgcgccgaatggtttgcaggtggaaggcaaagagacggtgcaaaaaattgttaccggtgtcaccgccagccaggctttgctcgatgaggcagtgcgtctgggcgcggatgcggtcattgtgcatcatggctacttctggaaaggagagtctccggtcattcgcggaatgaagcgtaaccgtttaaaaacgttgctggcgaatgatatcaacctgtatggctggcatttgccgcttgacgcacatcctgagctgggcaataacgcacagctggcggcgttactggggatcacggtcatgggcgaaattgagccgttggtgccgtggggcgaactgaccatgcctgtgccgggactggagctggcttcctggattgaagcgcgtctgggacgtaagccgttatggtgtggcgataccggacctgaggtggtccagcgcgtcgcctggtgcacgggcggcgggcaaagttttatcgatagcgccgcgcgttttggcgtggatgcttttattactggcgaagtttctgaacagaccattcatagtgcccgcgagcagggattgcatttttatgctgcaggtcaccatgccactgaacgtggtggtattcgcgcattgagcgagtggctgaatgaaaataccgatcttgatgtgacctttattgatattcctaatcctgcataacgaataatcagagggatcgaaagtgcaacgagcgcgttgttatctgataggtgaaacggcggtagtgctggaactggaaccgccggtgacgctggctagccagaaacggatctggcgactggcgcagcgtctggtggatatgccgaatgtggttgaagccattcccggcatgaacaatatcacggtgattttgcgtaatcctgagagcctggcgctggatgccatagagcgtttgcaacgctggtgggaggagagcgaggcgctggagccggagtctcgctttattgaaattccggtggtttacggtggtgcaggcggaccggatttggcggtggtcgcggcgcattgcgggttgagcgaaaaacaggttgttgaattgcactcctccgtggaatacgtggtctggtttttaggttttcaaccgggcttcccgtatctcgggagtttgccggaacaactacacacgccacggcgcgctgaaccgcgcttactcgttccggcaggttctgtcgggatcggcgggccgcagactggtgtttatccgctggcaacgccgggtggctggcagttgattggtcataccagtctcagcctgtttgatccggcgcgtgacgaacccatcttattacgtccgggagacagcgtgcgctttgtaccgcagaaggagggagtatgctgaagattattcgtgcgggcatgtataccactgtgcaggatggcggtcgtcacggttttcgccagagcggtatcagccactgcggcgcactggatatgcccgcgttacgcattgctaacctactggtgggtaatgacgccaatgcccccgcgctggagatcacgctcggtcagttaactgttgagttcgaaactgatgggtggtttgctctgacgggtgccggttgcgaagcgcggctggatgataatgccgtctggaccggctggcgattgccgatgaaagcaggccagcgtttaacgcttaaacgcccgcagcacgggatgcgcagttatctggcggtcgcgggtggtattgatgttccgccggtaatgggcagttgcagcaccgatctcaaagtggggattggcgggctggaaggccgtttactgaaggatggtgaccgactcccgattggcaaaagcaagcgtgattctatggaagcgcagggcgttaaacagctgctgtggggcaaccgcattcgcgccttgccggggccggaatatcatgagttcgatcgcgccagccaggatgcattctggcgtagcccctggcagcttagcagccaaagtaaccgcatgggctatcgcttacaggggcaaattttaaaacgcaccaccgatcgcgaactgttatctcacggtttgttaccgggcgtggtgcaggtgccacataacgggcagccgattgtgttgatgaacgacgcacagaccaccggtggttacccgcgtattgcctgtatcattgaggctgatatgtaccatctggcgcaaattccgctcggtcagccgattcattttgtccagtgtagtctggaagaggcactaaaagcacggcaagatcagcaacgttattttgaacaattagcgtggcggctgcacaatgaaaattgacctgaacgccgatctgggcgaaggctgcgccagcgacgcagagctattaacgctggtttcctctgccaatattgcctgtggatttcatgcaggcgatgcgcaaatcatgcaggcttgcgtgcgtgaagcaataaaaaatggtgtcgcgattggcgctcacccgagttttcccgacagggaaaattttggtcgcagcgccatgcagctgccgccagaaaccgtttacgcccagacgctgtatcaaattggcgcgctggcaacgattgcccgtgcgcaaggcggcgtaatgcgtcatgtcaaaccgcacggcatgttgtacaaccaggcggcgaaagaagcacaactggcagacgccatcgccagagcggtatacgcttgcgatccagcattgattctcgtcgggctggcgggaagcgagctgattcgtgcaggcaagcaatatggtctgacaacgcgcgaggaagtgtttgccgatcgcggttatcaggctgacggcagcctggtgccgcgaagccagagtggcgcgttgattgaaaacgaagaacaggcgctggcgcaaacgctggagatggtgcaacacggcagagtcaaaagtatcaccggcgaatgggcaacggtcgcggcgcaaacggtctgcctgcatggcgacggcgagcacgcactggcgttcgcccgccgactacgctctgcatttgccgaaaaggggattgttgtcgcagcataaccccgattaataaagaatgaaaaaaggatatcaccatgcctgaaggcccggagatccgccgtgcagcggataacctggaggcggcgatcaaaggcaaaccactaactgatgtctggtttgccttcccgcagttaaaaccttatcaaagtcaacttatcggtcaacacgttacccatgtggaaacgcgtggtaaggcgttgttaactcatttttccaacgacttaacgctctacagccataatcagctttacggcgtctggcgcgtggttgataccggcgaagagccgcagaccacgcgagtattgcgggtaaaactgcaaacggctgacaaaaccattctgctttatagcgccagcgatattgagatgttgaccccggaacaactgaccacgcatccgtttttacaacgcgttggtcccgatgtgctggatccgaatctgacgccggaggtggtgaaagaacgattattgagcccgcgctttcgtaaccgtcagtttgctggattactgctcgatcaggcgtttctggctgggcttggcaattatttgcgggtggagatcctctggcaggttgggttgactggaaatcataaagcgaaagatctcaatgcggcgcaactggatgcactcgcacacgcgttactggagattcctcgattttcctacgctacgcgggggcaggtggatgagaataagcatcatggggcgctgtttcgctttaaggtttttcatcgagatggcgaaccgtgcgaacgttgtggcagcatcattgagaaaaccacgctgagttctcgcccgttttactggtgccctggctgccagcattaagcgctccgcttcggcgcataggtactaataaaccgcgcaatggcaggccctgtcagcaaaatactgaacaggcgtagggtttgcatcgccataatgagcgccatatcggcattgctccctgcggcgatgaccgccacggtatcaagcccgccggggctggtggcgaggtaggcagtcataaaatcaatgtgcataaaccgggtcagcccccacgccatacccgcacaaatagccagcagagcaaaaatgctcagcaggatttgcggtagcgggcgtagtgcccgcagtaagatttgtttatcgaaaccaagaccaatccgccagccaattgccatatacgccatcgccagcagccattccggtagttcgatggtgatgagctgaccagactggagcactgcgcccgccagcatcgggatgagcatcgtgccggaaggaagacgcagcaggcatcccactgtaccggcaacgaccgcgagcaaaatagtaagcaggagattaatgctcactggcgggaaccagacgatatgctggttaaccgcttcagcgttatcgcccagcatcatgcgggtgaccagaacagcggcccccgcgacgaacagcactcgcagatattgcataaacgccaccaggcgaatatctgcgccgtaatcttgcgccatagcgaccattgccgccgcgccgccaggagaggagccccaggcaccggtatttccaggcaaactgctatagcgcaccaataaccaacccacaatggcgctggaaagcagcgttaccagtaaaattgcaagcacgatcggccagttgacggccagggtggtgagaatgctaccagtgaggttttgcgcaatcatgcagccaagaatggcctgggcggcgagaaaagcagagcggggaagttgcagagtaattccgcgcatactaaagatgatcccggcgatcatcggcccaagtaatagcgccgccgggagatgtaccgcgaggaaaccaatagaaaggagaagacttagcacacataacattccccactgcaaaactggcatccttcgctccctcattattttctctttggtgtatcgatacagcataaagaaagctgggccaggaaaaaataacagcaatcaaggaaaaggggaaaatcagcaattttctgaaagagatgccctttccggcggcaaagggcatcatggtaaatcagttatagttaatcttaaaaagcaccactgtatcgaaggggccagcctcgatgggggtgcctggaatggagctaagttcagccgtataggttttttcgtagaccaacatgtcactggtgaaatcggcgtattcagcatatttattgaaggtataagggctggcgttttcatccagtaaacgtagcttcagaccattaccaatcaacaatgctttatcttcttcaaccaacgtttcttcggtataaaaggaggaactgactttaaatccgtcggtgcattgatcgttttggctcttggtcgttttaatactgaacgttttgctcattgtgtggcgacgtatatccagcaaattaaatttaccaaaatcaatcacctgtgtttccggactaatggaaaaattgacgctgcaatccagcacgcgaatgttttccagaccagtaatatgatatttcaggttttgggcagtagggtcttcgttaacgctaccggcaccgtcaaattgcacgacgatatagtcgctaagcgtactttgataatcatgcggcggcatttctcgtattttgacgtataaccgcatgcgagcgagaaaggtacggctcatatgaatattagcgggatcgccgctgcaaattttgttctgccatcccatcgcgatgatctgctcaggggtataaatatcaatgttcttactgtcgatacactggttagtgtcgatgcgactttttcccagactggcatcgtaatcgacaccgttgtatgtcacgccgagttgataataacgatcctgcacccccggataggggtttacccaggcgtagacatgctcgctttcaaagttgccgttggtattgttgtcacaatagacgggaattttaatatcgtcagattcccagatcttatcaccgggtttggcattgcctggtacagcaaacggttgaatcgcttcacttttttctactgcgccaccagatgtaccaaaatagcagttcagcgccattgcagacttcaacggcagaaataacaggcagatgacgagcaacaatcccttgccagcactcatttcgcctccactgcttgtaaacggcattgtccgctgcagttgagcgtcgtcatgcgtaatgcgccgtaatcatccatgtaaccgagataaaactggctgccgctataacttccggtgtttgtgttgaccgtactaaaaggtgcaaccatcacggttttgaagcctgggagaacgcctttttcatttctccccagataggcaatggtcagataatacgcggtaggatttttcagtgtcagttggttgccctgctggctgacctgtaactgcagttcgaccttttctcctgctttcttgcgtaatgcagccggtcgccagaacaatttaatacgactttgaatagcgacctgaagtatcgcatggtcgctgcttttatccggagcgggaggaatttcgcgcatattgtagaaaaatagcgtttcgcgatcgccaggtaattgtgtggtactggcttgtttcacaacccgcacctggcttgtcgctttcggttccagacgttgaatagggggcaaagcgaccagaagagcatcgcttttctcccctttttcattttctatccaggaataagcaagataaggcagtttgtcactttggttttcgatacgcaggctggtggctttgtcattggcgttaaacacaatgcgtgtgcgatcgggttgcaccgcagcattgcaacccaagctgatggttaacaacattaagggtaatcctttaataaatgtcattctcttttccttaattaatgacaaggtaaaatcaggcgtttggtcgtgtcttccagacgttctggcagatgaataatgcagctttgctcaccccagaccacggtaaacagttgattttcagcgacaccgcttaaccaggcatgtccttcctcgccaaccatacccacgctaatgccgctgtcatcctggcggatatccgcaccgaggggagggaactgaccgctggcgttgcgtatgatgacgttaacgtctttaccggaacgggaagccagacttttgtaacctatcgcgccttcaatccatgtttccttgatgacgttttctgcaactgttacgccgtcgggtaagtcattcatgttcaccgccacggtggaaggctggtaactggaaatcaacggcaccaccgcaatgccaaaatggttggtgtagtcgagattgccctgaaccggaatatctgccacgccatcggtgctgaccatcaggcgtggttcattggtggagctgcggcgatgaaatgctgcaccatattgggttgcggtgaaagaaccgctccagctgctgctgacggaactgtaatcactggcggcataggtaccagaaatatcccactcacccgcactactcaggtgctgatagttaccgctcacctgggctccattgtccggacgatcggattgcagtccggcagacatgccccagctattacgttcatccagcgtatcgttccagctcatgcggtgtatggtgctgtggctactgttttgcatgtcatagccaacccgaccaccgttaccgaaggggaggctaatgctcagataaatctggttgtcgcgatctttatcttcgtagtgggtcgtattgaaactcgtgctaatgctgatatctctccagtcaccaatatcaacattaaaacctgctgtgatgttggcggtcgtggaggcgtctgcattccaccaggtttgatgtagcaggttggcgtaaagattgaggtttagtggggtaatcggttggcccacggataagctgatcgtctgtttttcgtcctgcgcatcgctgtcgttgtatttgtgatccagatagttggcgtagctgtgaaaatgacgatcactgaagcgataagcggcgaggctaatcgtgctgttggtggcatccacttgtttgctgtaattaaaacggtagcttaagccccgctcgtcctgctgagtatcaaaatggctactggcccaggtgacatcaaaggacagtgcgccaagccacagcatattttgcccgatacccattgcggcagaatggtagtcatcatcagaaatcagcaggccgccgtacaggctggtgttactgagcatcccccaggaaacttcattgctaaaaaaggtttcattttcagtttgatgactcatggaaggccgtggctgacccgcggccaatttatagcgaacctgtccctggcgagtcaggaagggcgtgcttgctgcgctaacctggaaattgttcacccgaccatcttcttccgtcactttgacatccagcgtgccctgaacagactgattgaggtcatcaataataaacgggcctggcgggacttttttctggtaaatgacgcggccactttgactgatcgtcaccgtggcattggtctgtgcaataccgctaatttgtggggcgtagccacgcagctcccacggtaacattcgatcgtcactcgccagtgccgcgccggtataagaaaaaccatcgaaaatattggaactgaaatcggtttcgccgagggttaacttagagcctaattgcggtaatggacgaaaaagataggtgcggcttattccgccactctggtcatggttatcttcgctatcggtcttattaagctggtaatcactgcgtaagcgccatgccccggcgttaattccggcggtaccgtaggcattcaggttagtgctgctgctgccgtcctgtgggcggtagctgctggcaaacaagttgtaatccatcaggacaccggcaacaccttctttccatgtagaggggggagcccagttttcactgtgccacgccagccaggcttgcggaatactaatattcagttgctgattggcttgatcgaaattgaagagcatttcaggtcgggaactgaaatcaatacaccgatctatctgtggcaaggactgacggacatctggttttaaaccaaatttatcgaccagactatcattgatgcatggaatggttttgtcaccctttttttgccagttaattttttgcccattactgattttgttgttattcaccgcaacgctaacaaaatattcaccgggagcaatgactcctttttcctttaataaactaatatcaatgcggtcgcgcatacttttatcgagaacattcagattgaattcgaccgccattgcgcaaggcatcgccatgaccaggcaggatacaaaagagagtcgataaatattcacggtgtccatacctgataaatattttatgaaaggcggcgatgatgccgccaaaataatacttatttataatccagcacgtaggttgcgttagcggttacttcacctgccgtgacatcgactgcattatcaatttgttccatccaggcgaaaaagttcagcgtctgttcactactgcttgcatccaggtcaagatctggcgcggcactacctaatacgatgttaccgtcatttttgtccatcagtcgtacaccgaccccagttgcttcgcctgcactggtgttgctcaacaaaggcgtagcaccagttgtcttagccgtgctatcgaaggttacgccaactttggataccggcattccgctaccgttgtcagaagcaggcagatcacagttgatcaagcgaatgtcgacggccactttattgctatgatgctcccggtttatatgggttgtcgtgacttgtccaagatctatgtttttatcaatatcttctggatgaatttcacaaggtgcttcaataacctcccccttaaagtgaatttcgccagaaccttcatcagcagcataaacaggtgcagtgaacagcagagatacggccagtgcggccaatgttttttgtcctttaaacataacagagtcctttaaggatatagaataggggtatagctacgccagaatatcgtatttgattattgctagtttttagttttgcttaaaaatattgttagttttattaaatgcaaaactaaattattggtatcatgaatttgttgtatgatgaataaaatataggggggtatagatagacgtcattttcatagggttataaatgcgactaccatgaagtttttaattgaaagtattgggttgctgataatttgagctgttctattctttttaaatatctatataggtctgttaatggattttatttttacaattttttgtgtttaggcatataaaaatcaacccgccatatgaacggcgggttaaaatatttacaacttagcaatcaaccattaacgcttgatatcgcttttaaagtcgcgtttttcatatcctgtatacagctgacgcggacgggcaatcttcataccgtcactgtgcatttcgctccagtgggcgatccagccaacggtacgtgccattgcgaaaatgacggtgaacatggaagacggaatacccatcgctttcaggatgataccagagtagaaatcgacgttcgggtacagtttcttctcgataaagtacgggtcgttcagcgcgatgttttccagctccatagccacttccagcaggtcatccttcgtgcccagctctttcagcacttcatggcaggtttcacgcattacggtggcgcgcgggtcgtaatttttgtacacgcggtgaccgaagcccatcaggcggaaagaatcatttttgtctttcgcacgacgaacaaattccggaatgtgtttaacggagctgatttcttccagcattttcagcgccgcttcgttagcaccgccgtgcgcaggtccccacagactagcaatacctgctgcgatacaggcaaacgggttcgcaccgctagagccagcggtacgcacggtggaggtagaggcgttctgttcatggtcagcgtgcaggatcagaatacggtccatagcacgttccagaatcggattaacttcatacggttcgcacggcgtggagaacatcatattcaggaagttaccggcgtaggagagatcgttgcgcgggtaaacaaatggctgaccaatggaatacttgtaacacatcgcggccatggtcggcattttgctcagcaggcggaacgcggcaatttcacggtgacgaggattgttaacatccaggctgtcgtgatagaacgccgccagcgcgccggtaataccacacatgactgccattggatggctgtcgcgacggaaagcatggaacagacgggtaatctgctcgtggatcatggtatgacgggtcaccgtagttttaaattcgtcatactgttcctgagtcggtttttcaccattcagcaggatgtaacaaacttccaggtagttagaatcggtcgccagctgatcgatcgggaaaccgcggtgcagcaaaataccttcatcaccatcaataaaagtaattttagattcgcaggatgcggtactagtgaagcctgggtcaaaggtgaacacacctttactaccgagagtacggatatcaataacatcttgacccagcgtgcctttcagcacatccagttcaacagctgtatccccgttgagggtgagttttgcttttgtatcagccatttaaggtctccttagcgccttattgcgtaagactgccggaacttaaatttgccttcgcacatcaacctggctttacccgttttttatttggctcgccgctctgtgaaagaggggaaaacctgggtacagagctctgggcgcttgcaggtaaaggatccattgatgacgaataaatggcgaatcaagtacttagcaatccgaattattaaacttgtctaccactaataactgtcccgaatgaattggtcaatacttccacactgttacataagttaatcttaggtgaaataccgacttcataacttttacgcattatatgcttttcctggtaatgtttgtaacaactttgttgaatgattgtcaaattagatgattaaaaattaaataaatgttgttatcgtgacctggatcactgttcaggataaaacccgacaaactatatgtaggttaattgtaatgattttgtgaacagcctatactgccgccaggtctccggaacaccctgcaatcccgagccacccagcgttgtaacgtgtcgttttcgcatctggaagcagtgttttgcatgacgcgcagttatagaaaggacgctgtctgacccgcaagcagaccggaggaaggaaatcccgacgtctccaggtaacagaaagttaacctctgtgcccgtagtccccagggaataataagaacagcatgtgggcgttattcatgataagaaatgtgaaaaaacaaagacctgttaatctggacctacagaccatccggttccccatcacggcgatagcgtccattctccatcgcgtttccggtgtgatcacctttgttgcagtgggcatcctgctgtggcttctgggtaccagcctctcttcccctgaaggtttcgagcaagcttccgcgattatgggcagcttcttcgtcaaatttatcatgtggggcatccttaccgctctggcgtatcacgtcgtcgtaggtattcgccacatgatgatggattttggctatctggaagaaacattcgaagcgggtaaacgctccgccaaaatctcctttgttattactgtcgtgcttagtcttctcgcaggagtcctcgtatggtaagcaacgcctccgcattaggacgcaatggcgtacatgatttcatcctcgttcgcgctaccgctatcgtcctgacgctctacatcatttatatggtcggttttttcgctaccagtggcgagctgacatatgaagtctggatcggtttcttcgcctctgcgttcaccaaagtgttcaccctgctggcgctgttttctatcttgatccatgcctggatcggcatgtggcaggtgttgaccgactacgttaaaccgctggctttgcgcctgatgctgcaactggtgattgtcgttgcactggtggtttacgtgatttatggattcgttgtggtgtggggtgtgtgatgaaattgccagtcagagaatttgatgcagttgtgattggtgccggtggcgcaggtatgcgcgcggcgctgcaaatttcccagagcggccagacctgtgcgctgctctctaaagtcttcccgacccgttcccataccgtttctgcgcaaggcggcattaccgttgcgctgggtaatacccatgaagataactgggaatggcatatgtacgacaccgtgaaagggagcgactatatcggtgaccaggacgcgattgaatatatgtgtaaaaccgggccggaagcgattctggaactcgaacacatgggcctgccgttcagccgtctcgatgatggtcgtatctatcaacgtccgtttggcggtcagagcaaaaacttcggcggcgagcaggcggcacgcactgcggcagcagctgaccgtaccggtcacgcactgttgcacacgctttatcagcagaacctgaaaaaccacaccaccattttctccgagtggtatgcgctggatctggtgaaaaaccaggatggcgcggtggtgggttgtaccgcactgtgcatcgaaaccggtgaagtggtttatttcaaagcccgcgctaccgtgctggcgactggcggagcagggcgtatttatcagtccaccaccaacgcccacattaacaccggcgacggtgtcggcatggctatccgtgccggcgtaccggtgcaggatatggaaatgtggcagttccacccgaccggcattgccggtgcgggcgtactggtcaccgaaggttgccgtggtgaaggcggttatctgctgaacaaacatggcgaacgttttatggagcgttatgcgccgaacgccaaagacctggcgggccgtgacgtggttgcgcgttccatcatgatcgaaatccgtgaaggtcgcggctgtgatggtccgtgggggccacacgcgaaactgaaactcgatcacctgggtaaagaagttctcgaatcccgtctgccgggtatcctggagctttcccgtaccttcgctcacgtcgatccggtgaaagagccgattccggttatcccaacctgtcactacatgatgggcggtattccgaccaaagttaccggtcaggcactgactgtgaatgagaaaggcgaagatgtggttgttccgggactgtttgccgttggtgaaatcgcttgtgtaagcgtacacggcgctaaccgtctgggcggcaacagcctgctggacctggtggtctttggtcgcgcggcaggtctgcatctgcaagagtctatcgccgagcagggcgcactgcgcgatgccagcgagtctgatgttgaagcgtctctggatcgcctgaaccgctggaacaataatcgtaacggtgaagatccggtggcgatccgtaaagcgctgcaagaatgtatgcagcataacttcagcgtcttccgtgaaggtgatgcgatggcgaaagggcttgagcagttgaaagtgatccgcgagcgtctgaaaaatgcccgtctggatgacacttccagcgagttcaacacccagcgcgttgagtgcctggaactggataacctgatggaaacggcgtatgcaacggctgtttctgccaacttccgtaccgaaagccgtggcgcgcatagccgcttcgacttcccggatcgtgatgatgaaaactggctgtgccactccctgtatctgccagagagcgaatccatgacgcgccgaagcgtcaacatggaaccgaaactgcgcccggcattcccgccgaagattcgtacttactaatgcggagacaggaaaatgagactcgagtttagtatttatcgctataacccggatgttgatgatgctccgcgtatgcaggattacaccctggaagcggatgaaggtcgcgacatgatgctgctggatgcgcttatccagctaaaagagaaagatcccagcctgagcttccgccgctcctgccgtgaaggtgtgtgcggttccgacggtctgaacatgaacggcaagaatggtctggcctgtattaccccgattagcgcactcaaccagccgggcaagaagattgtgattcgcccgctgccaggtttaccggtgatccgcgatttggtggtagacatgggacaattctatgcgcaatatgagaaaattaagccttacctgttgaataatggacaaaatccgccagctcgcgagcatttacagatgccagagcagcgcgaaaaactcgacgggctgtatgaatgtattctctgcgcatgttgtagtacctcttgtccgtctttctggtggaatcccgataagtttatcggcccggcaggcttgttagcggcatatcgtttcctgattgatagccgtgataccgagactgacagccgcctcgacggtttgagtgatgcattcagcgtattccgctgtcacagcatcatgaactgcgtcagtgtatgtccgaaggggctgaacccgacgcgcgccatcggccatatcaagagcatgttgttgcaacgtaatgcgtaaaccgtaggcctgataagacgcgcaagcgtcgcatcaggcaaccagtgccggatgcggcgtgaacgccttatccggcctacaagtcattacccgtaggcctgataagcgcagcgcatcaggcgtaacaaagaaatgcaggaaatctttaaaaactgcccctgacactaagacagtttttaaaggttccttcgcgagccactacgtagacaagagctcgcaagtgaaccccggcacgcacatcactgtgcgtggtagtatccacggcgaagtaagcataaaaaagatgcttaagggatcacgatgcagaacagcgctttgaaagcctggttggactcttcttacctctctggcgcaaaccagagctggatagaacagctctatgaagacttcttaaccgatcctgacagcgttgacgctaactggcgtaacacgttccagcagttacctggtacgggagtcaaaccggatcaattccactctcaaacgcgtgaatatttccgccgcctggcgaaagacgctagtcgttactctagtacgatctccgaccctgacaccaatgtgaagcaggttaaagtcctgcagctcattaacgcataccgcttccgtggtcaccagcatgcgaatctcgatccgctgggactgtggcagcaagataaagtggccgatctggatccgtctttccacgatctgaccgaagcagacttccaggagaccttcaacgtcggtagttttgccagcggcaaagaaaccatgaaactcggcgagctgctggaagccctcaagcaaacctactgcggcccgattggtgccgagtatatgcacattaccagcaccgaagaaaaacgctggatccaacagcgtatcgagtctggtcgcgcgactttcaatagcgaagagaaaaaacgcttcttaagcgaactgaccgccgctgaaggtcttgaacgttacctcggcgcaaaattccctggcgcaaaacgcttcagcctggaaggcggtgacgcgttaatcccgatgcttaaagagatgatccgccacgctggcaacagcggcacccgcgaagtggttctcgggatggcgcaccgtggtcgtctgaacgtgctggtgaacgtgctgggtaaaaaaccgcaagacttgttcgacgagttcgccggtaaacataaagaacacctcggcacgggtgacgtgaaataccacatgggcttcagctctgacttccagaccgatggcggcctggtgcacctggcgctggcgtttaacccgtctcaccttgagattgtaagcccggtagttatcggttctgttcgtgcccgtctggacagacttgatgagccgagcagcaacaaagtgctgccaatcaccatccacggtgacgccgcagtgaccgggcagggcgtggttcaggaaaccctgaacatgagcaaagcgcgtggttatgaagttggcggtacggtacgtatcgttatcaacaaccaggttggtttcaccacctctaatccgctggatgcccgttctacgccgtactgtactgatatcggtaagatggttcaggccccgatttttcacgttaacgcggacgatccggaagccgttgcctttgtgacccgtctggcgctcgatttccgtaacacctttaaacgtgatgtcttcatcgacctggtgtgctaccgccgtcacggccacaacgaagccgacgagccgagcgcaacccagccgctgatgtatcagaaaatcaaaaaacatccgacaccgcgcaaaatctacgctgacaagctggagcaggaaaaagtggcgacgctggaagatgccaccgagatggttaacctgtaccgcgatgcgctggatgctggcgattgcgtagtggcagagtggcgtccgatgaacatgcactctttcacctggagcccgtacctcaaccacgaatgggacgaagagtacccgaacaaagttgagatgaagcgcctgcaggagctggcgaaacgcatcagcacggtgccggaagcagttgaaatgcagtctcgcgttgccaagatttatggcgatcgccaggcgatggctgccggtgagaaactgttcgactggggcggtgcggaaaacctcgcttacgccacgctggttgatgaaggcattccggttcgcctgagcggtgaagactccggtcgcggtaccttcttccaccgccacgcggtgatccacaaccagtctaacggttccacttacacgccgctgcaacatatccataacgggcagggcgcgttccgtgtctgggactccgtactgtctgaagaagcagtgctggcgtttgaatatggttatgccaccgcagaaccacgcactctgaccatctgggaagcgcagttcggtgacttcgccaacggtgcgcaggtggttatcgaccagttcatctcctctggcgaacagaaatggggccggatgtgtggtctggtgatgttgctgccgcacggttacgaagggcaggggccggagcactcctccgcgcgtctggaacgttatctgcaactttgtgctgagcaaaacatgcaggtttgcgtaccgtctaccccggcacaggtttaccacatgctgcgtcgtcaggcgctgcgcgggatgcgtcgtccgctggtcgtgatgagcccgaaatccctgctgcgtcatccgctggcggtttccagcctcgaagaactggcgaacggcaccttcctgccagccatcggtgaaatcgacgagcttgatccgaagggcgtgaagcgcgtagtgatgtgttctggtaaggtttattacgacctgctggaacagcgtcgtaagaacaatcaacacgatgtcgccattgtgcgtatcgagcaactctacccgttcccgcataaagcgatgcaggaagtgttgcagcagtttgctcacgtcaaggattttgtctggtgccaggaagagccgctcaaccagggcgcatggtactgcagccagcatcatttccgtgaagtgattccgtttggggcttctctgcgttatgcaggccgcccggcctccgcctctccggcggtagggtatatgtccgttcaccagaaacagcaacaagatctggttaatgacgcgctgaacgtcgaataaataaaggatacacaatgagtagcgtagatattctggtccctgacctgcctgaatccgtagccgatgccaccgtcgcaacctggcataaaaaacccggcgacgcagtcgtacgtgatgaagtgctggtagaaatcgaaactgacaaagtggtactggaagtaccggcaagtgcagacggcattctggatgcggttctggaagatgaaggtacaacggtaacgtctcgtcagatccttggtcgcctgcgtgaaggcaacagcgccggtaaagaaaccagcgccaaatctgaagagaaagcgtccactccggcgcaacgccagcaggcgtctctggaagagcaaaacaacgatgcgttaagcccggcgatccgtcgcctgctggctgaacacaatctcgacgccagcgccattaaaggcaccggtgtgggtggtcgtctgactcgtgaagatgtggaaaaacatctggcgaaagccccggcgaaagagtctgctccggcagcggctgctccggcggcgcaaccggctctggctgcacgtagtgaaaaacgtgtcccgatgactcgcctgcgtaagcgtgtggcagagcgtctgctggaagcgaaaaactccaccgccatgctgaccacgttcaacgaagtcaacatgaagccgattatggatctgcgtaagcagtacggtgaagcgtttgaaaaacgccacggcatccgtctgggctttatgtccttctacgtgaaagcggtggttgaagccctgaaacgttacccggaagtgaacgcttctatcgacggcgatgacgtggtttaccacaactatttcgacgtcagcatggcggtttctacgccgcgcggcctggtgacgccggttctgcgtgatgtcgataccctcggcatggcagacatcgagaagaaaatcaaagagctggcagtcaaaggccgtgacggcaagctgaccgttgaagatctgaccggtggtaacttcaccatcaccaacggtggtgtgttcggttccctgatgtctacgccgatcatcaacccgccgcagagcgcaattctgggtatgcacgctatcaaagatcgtccgatggcggtgaatggtcaggttgagatcctgccgatgatgtacctggcgctgtcctacgatcaccgtctgatcgatggtcgcgaatccgtgggcttcctggtaacgatcaaagagttgctggaagatccgacgcgtctgctgctggacgtgtaatagtttaagtttcacctgcactgtagaccggataaggcattatcgccttctccggcaattgaagcctgatgcgacgctgacgcgtcttatcaggcctacgggaccaccaatgtaggtcggataaggcgcaagcgccgcatccgacaagcgatgcctgatgtgacgtttaacgtgtcttatcaggcctacgggtgaccgacaatgcccggaagcgatacgaaatattcggtctacggtttaaaagataacgattactgaaggatggacagaacacatgaacttacatgaatatcaggcaaaacaactttttgcccgctatggcttaccagcaccggtgggttatgcctgtactactccgcgcgaagcagaagaagccgctagtaaaatcggtgccggtccgtgggtagtgaaatgtcaggttcacgctggtggccgcggtaaagcgggcggtgtgaaagttgtaaacagcaaagaagacatccgtgcttttgcagaaaactggctgggcaagcgtctggtaacgtatcaaacagatgccaatggccaaccggttaaccagattctggttgaagcagcgaccgatatcgctaaagagctgtatctcggtgccgttgttgaccgtagttcccgtcgtgtggtctttatggcctccaccgaaggcggcgtggaaatcgaaaaagtggcggaagaaactccgcacctgatccataaagttgcgcttgatccgctgactggcccgatgccgtatcagggacgcgagctggcgttcaaactgggtctggaaggtaaactggttcagcagttcaccaaaatcttcatgggcctggcgaccattttcctggagcgcgacctggcgttgatcgaaatcaacccgctggtcatcaccaaacagggcgatctgatttgcctcgacggcaaactgggcgctgacggcaacgcactgttccgccagcctgatctgcgcgaaatgcgtgaccagagccaggaagatccgcgtgaagcacaggctgcacagtgggaactgaactacgttgcgctggacggtaacatcggttgtatggttaacggcgcaggtctggcgatgggtacgatggacatcgttaaactgcacggcggcgaaccggctaacttccttgacgttggcggcggcgcaaccaaagaacgtgtaaccgaagcgttcaaaatcatcctctctgacgacaaagtgaaagccgttctggttaacatcttcggcggtatcgttcgttgcgacctgatcgctgacggtatcatcggcgcggtagcagaagtgggtgttaacgtaccggtcgtggtacgtctggaaggtaacaacgccgaactcggcgcgaagaaactggctgacagcggcctgaatattattgcagcaaaaggtctgacggatgcagctcagcaggttgttgccgcagtggaggggaaataatgtccattttaatcgataaaaacaccaaggttatctgccagggctttaccggtagccaggggactttccacagtgaacaggccattgcatacggcactaaaatggttggcggcgtaaccccaggtaaaggcggcaccacccacctcggcctgccggtgttcaacaccgtgcgtgaagccgttgctgccactggcgctaccgcttctgttatctacgtaccagcaccgttctgcaaagactccattctggaagccatcgacgcaggcatcaaactgattatcaccatcactgaaggcatcccgacgctggatatgctgaccgtgaaagtgaagctggatgaagcaggcgttcgtatgatcggcccgaactgcccaggcgttatcactccgggtgaatgcaaaatcggtatccagcctggtcacattcacaaaccgggtaaagtgggtatcgtttcccgttccggtacactgacctatgaagcggttaaacagaccacggattacggtttcggtcagagcacctgtgtcggtatcggcggtgacccgatcccgggctctaactttatcgacattctcgaaatgttcgaaaaagatccgcagaccgaagcgatcgtgatgatcggtgagatcggcggtagcgctgaagaagaagcagctgcgtacatcaaagagcacgttaccaagccagttgtgggttacatcgctggtgtgactgcgccgaaaggcaaacgtatgggccacgcgggtgccatcattgccggtgggaaagggactgcggatgagaaattcgctgctctggaagccgcaggcgtgaaaaccgttcgcagcctggcggatatcggtgaagcactgaaaactgttctgaaataaatatctgtaataagaaatagccctcgccgcttccctctacaggaatggcgaagggctgtcggtttcgacatggttggccatcgtatgatggccttttttgtgcttatcggctactttttcgctgcgctatcagggtaaatttatagtcatcggtattaaaagcgttgcggctatattcaaacacccgaccatcaactaaatatccacggcttactttttcaagaatcggctttgtctggctgatattaagcagacggctcatctcttcggttggcatcagaggaatgatttcctgttcgctacgatcgataaccattttcttcacttcttcgataaagtgatatttgctattttccatgacctgccaggtgagatccgggaacaacgcaagcggcatccaggtttcttccagcgccattggcttttgcttgcgatagcgcacgcgcttcacatgccacacacgatcctgcggggtgatttgtagctgttgctgaagaaaatcgtcagccggaatcacttcgaatatcagaacttcactgtgtgtatcgacgtgacggtcgctcagtttttcatcaaaactggttaactgaaaaatatcgtaattgacccgctcttctttgacgtaagtcccgctgccctgaatgctttcgaggatctgctgctcgactagctggcgcaaagcctgacgcaccgtaacccggctgacgccaaactctgtttgtagcgcactttcagtgggtaacgcatcgccaggtttaagctcgccacgcgcaatttgttcacgaatgcgatcggcaatctgccggtataagggcttgtgtcccatttttagtatctcattaatacgaatttaaccattatgcccgataaattcatcctgtaaataatacaaatacaatacaaataatttcaatcaagtgaaattgatcacataatggtattgttttatcgggcacactggcgcgactataaaaacgatcaagtgaggatcatgatgaatctgacgactctgacccaccgcgatgcgttgtgtctgaatgcgcgctttaccagccgtgaagaggccatccacgcgttgactcaacgtcttgctgctctggggaaaatttccagtactgagcaatttctggaagaagtgtatcgccgtgaaagccttggcccgaccgccttaggtgaagggttggctgtgccgcatggcaaaactgctgcggtaaaagaagcggcgtttgcggtcgccacactcagcgagccgcttcagtgggaaggcgttgatggcccggaagcagttgatttagtggtgctgctggcgattccccccaatgaagcgggtactacgcatatgcaactgctgacagcgctgaccacgcgccttgcggatgatgagattcgggcgcgtatacagagcgcgacgacgcctgatgagttgctcagcgcgctggatgacaagggaggcacgcaaccttctgcctctttttccaacgcgccaactatcgtctgcgtaacggcctgtccggcgggtattgctcacacctatatggctgcggaatatctggaaaaagccggacgcaaactcggcgtaaatgtttacgttgaaaaacaaggcgctaacggcattgaagggcgtttaacggcggatcaactcaatagtgcaaccgcctgtatttttgcggctgaagtcgccatcaaggagagtgagcgttttaatggcattcccgcgcttagtgtgcctgttgccgagccgattcgccatgcagaagcgttgatccaacaagcgcttaccctcaagcgtagcgatgagacgcgtaccgtacagcaagatacgcaaccggtgaaaagtgtcaaaacggagctgaaacaggcactgttgagcggaatctcttttgccgtaccgttgattgtcgcggggggcacggtgctggcggtcgcggtattactgagccaaatcttcgggctacaagatctgtttaatgaagaaaactcctggctgtggatgtaccgcaagctgggcggcgggctgctcggaattttgatggtaccggtgctcgcggcctataccgcctattctctggcagataaaccggcgttagcgccaggctttgcggctggacttgccgccaacatgatcggctccgggtttctcggcgcggtcgttggcggattgatagccggttacttgatgcgctgggtgaaaaatcacttgcgtcttagcagtaaattcaatggattcctgactttttatctctacccggtgctcggtacgttgggagcgggcagtctgatgctgtttgtggtgggggaacctgtcgcctggatcaataacagccttaccgcctggctgaacggtctgagtggaagtaacgcgctgttgctgggtgccattctcggttttatgtgttcctttgaccttggagggccagtgaataaagccgcttatgcattctgcctgggcgcaatggcgaacggcgtttacggcccgtatgccattttcgcctccgtcaaaatggttagcgcatttaccgtaaccgcttccacgatgctcgcaccgcgcctgtttaaagagtttgaaattgagaccgggaaatccacctggctgttagggctggcaggtattaccgaaggggcgatcccgatggcgattgaagatccgctgcgggttattggtagctttgtgctgggctctatggtaacgggcgctattgtcggtgcgatgaatatcggccttagcacacccggtgccggcattttcagcctctttttacttcatgataatggcgcgggcggtgttatggcggcaattggctggtttggcgcggcattggtgggggctgcaatcagcactgcaattctcctgatgtggcggcgtcacgcggttaagcatggcaactatctgactgatggcgtaatgccataaacaaaaaggaaacgacgatgaaagcagtatctcgcgttcacatcaccccgcatatgcactgggatcgagagtggtatttcaccaccgaagagagtcgtattctgctggtcaataatatggaagagatcctgtgccgactggaacaggacaacgaatacaaatattacgtactcgacgggcaaacggcgatcctcgaagattatttcgcggtgaaaccggaaaacaaagaccgtgtgaagaaacaggtagaagccggcaagttgattatcggcccctggtatacccagaccgataccacgattgtttctgcggaatccatcgtccgtaatctgatgtacggaatgcgtgactgcctcgcgtttggcgagccgatgaaaataggttatttaccagattcctttggcatgtccgggcaactgccgcatatctacaatggatttggcattacccgcaccatgttctggcgcggatgtagcgagcgccacggtactgataaaaccgagtttttgtggcaaagcagtgacggtagcgaagtgacggcgcaggtgctgccgctgggctacgccatcggtaagtacttacctgccgacgaaaacggattacgtaaacgcctcgacagttattttgacgtgctggaaaaagcgtctgtaaccaaagagattttgctgccgaatgggcatgaccagatgccattgcagcaaaatatcttcgaagtgatggataagctacgtgagatctaccctcaacgtaagtttgtgatgagccgctttgaagaggtatttgagaagatcgaagcgcagcgagataatctggcaaccctgaaaggggaatttattgatggcaaatatatgcgcgtgcatcgcaccatcggttctacgcgtatggatatcaaaattgcccacgcgcgtattgaaaataagattgttaatctgctggaaccgctggcaacactggcctggacgttgggttttgaataccaccacggcttgctggagaaaatgtggaaagagatcttaaaaaatcatgcccacgacagtatcggctgctgctgtagtgacaaagttcatcgcgaaatcgtcgcccgcttcgaactggctgaagacatggcggataatctgattcgtttctacatgcgcaaaattgccgacaacatgccgcagagcgacgccgacaaactcgtcctgtttaacctgatgccctggccgcgtgaagaagttatcaacaccactgtgcggctgcgcgccagccagtttaatttgcgggacgatcgcggtcagcctgtaccgtattttattcgccatgcccgtgagatcgatccaggcctaatcgatcggcaaatagttcattacggtaattacgatccctttatggagtttgatatacagatcaaccagattgtcccttctatgggctatcgcacgctttatatcgaagcgaatcagcctggcaacgtaattgcggcaaaaagtgacgctgaagggatactggaaaatgctttctggcaaattgcgctcaatgaggatggttctctgcaactggtagataaagacagcggtgtgcgctatgaccgggtattgcaaattgaagaaagctctgatgatggtgatgaatatgactatagtcccgcaaaagaagagtgggtaattaccgcagcgaacgcgaaaccgcaatgcgatattattcatgaagcctggcagagcagggctgttatccgctatgacatggcagtgccgctcaatttgagtgaacgcagcgcccggcaatccactggcagagtaggggtggtgttggttgtcactcttagtcataacagcaggcgtattgatgtggatatcaatcttgataaccaggctgacgatcatcgccttcgtgtcctggtccctacaccttttaacaccgacagtgttctggcagatacgcagtttggtagcctaacgcgccccgtgaacgacagtgcaatgaacaactggcagcaagaaggctggaaagaagcgccggttccggtatggaatatgctcaactatgttgccttacaggaagggcgtaacggcatggctgtctttagcgaagggttacgtgaatttgaagtcatcggtgaagagaagaaaacctttgccattacgttgctgcgtggcgtgggcttactgggcaaagaagatctgcttttaaggcctgggcggcctagcggaattaaaatgccagtcccggacagtcaactacgtggtctgctttcttgtcgcctaagtttattgagttataccggtacgccaaccgccgctggtgtagctcagcaggcgcgagcatggctgactccagtacagtgttacaacaaaatcccatgggatgtgatgaagctcaacaaagccggattcaacgtgccggaaagttatagtttgttgaaaatgcccccagtgggatgcctgataagcgcacttaagaaagctgaagaccgacaagaagtgattttacggctgtttaatccggctgaaagtgcaacctgtgatgcgactgttgctttcagtcgcgaggtgatttcttgcagtgaaacgatgatggatgaacacattaccaccgaggaaaatcaaggtagtaatctaagcgggccttttttacccggccagagtcggacgttcagttaccggcttgcctgaatagcaatcaaaccgaagccacatatgcgcggccagattgttgacaaagggcgctttgttcatgccggatacggcatgaacgctttattcggtctacaaaagcaggcaaattcaatatattgcagagatgatgtagacactggcaagcgtagcgcatcaggtaattttgcgtttatcttcactctcaagccacgtatatgtggctttatttttaacaaaataataaccctgggtgagttaattataatataattataagttaactaaatgttaatattggcggggtggatttatgcctttattagtaatcctgaaactctgcgtcgtattagccagtgaccaaaaaaagaattaaggtcaaccgtgctgtttttgcttcgtctctttttatctttaattgccaaccgaaactaatttcagccttataactcacacattttaaacataaatgtcactaaagttaccttattgaaacatgattaacataatttgtaggaattgatatttatcaatgtataagtcttggaaatgggcatcaaaaagagataaattgttctcgatcaaattggctgaaaggcggtaatttagctataaattgatcaccgtcgaaaaatgcaaatttgcttcaacaaaaacctgtttattgtaaggattttgcggcgtaatatatacgtgggatcaatttgagtttttattaacatgtttgcaacctttctttacgccgtttttgtgtgcattcacatggtatgatgaaagtgttcaaacaaatttctattggggcatgcgtgtgaccctttctaacggggttcactctcggagtcttcatgcgatgagcaaggagtcatgatgttagatatagtcgaactgagccgcttacagtttgccttgaccgcgatgtaccacttcctttttgtgccactgacgctcggtatggcgttcctgctggccattatggaaacggtctacgtcctctccggcaaacagatttataaagatatgaccaagttctggggcaagttgtttggtatcaacttcgctctgggtgtggctaccggtctgaccatggagttccagttcgggactaactggtcttactattcccactatgtaggggatatcttcggtgcgccgctggcaatcgaaggtctgatggccttcttcctcgaatccacctttgtaggtctgttcttcttcggttgggatcgtctgggtaaagttcagcatatgtgtgtcacctggctggtggcgctcggtagtaacctgtccgcactgtggattctggttgcgaacggctggatgcaaaacccaatcgcgtccgatttcaactttgaaactatgcgtatggagatggtgagcttctccgagctggtgcttaacccggttgctcaggtgaaattcgttcacactgtagcgtctggttatgtgactggcgcgatgttcatcctcggtatcagcgcatggtatatgctgaaaggtcgtgacttcgccttcgctaaacgctcctttgctatcgctgccagcttcggtatggctgctgttctgtctgttattgttctgggtgatgaatccggctacgaaatgggcgacgtgcagaaaaccaaactggctgctattgaagccgagtgggaaacgcaacctgcgcctgctgcctttactctgttcggcattcctgatcaggaagaggagacgaacaaatttgcgattcagatcccttacgcactgggcatcattgcaacgcgttccgtggataccccggttatcggcctgaaagagctgatggtgcagcatgaagaacgcattcgtaacgggatgaaggcgtactctctgctcgaacaactgcgttctggttctaccgaccaggcggttcgtgaccagttcaatagcatgaagaaagacctcggttacggtctgctgctgaaacgctatacgccaaacgtggctgatgcgactgaagcgcagattcaacaggcaaccaaagactccatcccgcgtgtagcgccgctgtactttgcgttccgtatcatggtggcgtgtggcttcctgcttctggcaatcatcgcgctctctttctggagtgtcatccgcaaccgcattggcgagaaaaaatggcttctgcgcgccgcgctgtacggtattccgctgccgtggattgctgtagaagcgggctggttcgtggctgaatatggccgccaaccgtgggctatcggtgaagtgctgccgacagctgtggcgaacagcagtctgaccgcaggcgatctcatcttcagtatggtgctgatttgcggcctgtataccctgttcctggtggcagaattgttcttaatgttcaagtttgcacgcctcggcccaagcagcctgaaaaccggtcgctatcactttgagcagtcttccacgactactcagccggcacgctaagacaggagtcgtcaaatgatcgattatgaagtattgcgttttatctggtggctgctggttggcgttctgctgattggttttgcagtcactgacggtttcgacatgggggtgggcatgctcacccgtttcctcggtcgtaacgacaccgagcgtcgaattatgattaactccattgcaccacactgggacggtaaccaggtttggctgatcaccgcgggcggcgcactctttgctgcctggccgatggtctatgccgctgcgttctccggcttctatgtggcgatgatcctcgtgctggcgtctttgttcttccgtccggtcggttttgactaccgctccaagattgaagaaacccgctggcgtaacatgtgggactggggcatcttcattggtagcttcgttccgccgctggtaattggtgtagcgttcggtaacctgttgcagggcgtaccgttcaacgttgatgaatatctgcgtctgtactacaccggtaacttcttccagttgcttaacccgttcggcctgctggcaggcgtggtgagcgtagggatgatcattactcagggcgcaacctatctgcaaatgcgtaccgtgggcgaactgcacctgcgtacccgtgcaacggctcaggtggctgcgctggtgacactggtctgtttcgcactggctggcgtatgggtgatgtacggtatcgatggttatgtcgtgaaaagcacaatggaccattacgcagcctctaacccactgaataaagaagtggttcgtgaagctggcgcatggctggttaacttcaacaacacgccaattctgtgggctattccggcactgggtgtggttctgccgctgctgaccatcctgactgcacgtatggataaagccgcgtgggcgtttgtgttctcctccctgacgctggcctgcatcatcctgacagccggtatcgcaatgttcccgtttgtgatgccgtccagcaccatgatgaacgcaagtctgacaatgtgggatgcaacttccagccagctgacgcttaacgtcatgacctgggttgcggtggttctggtaccgatcattctgctctacaccgcctggtgttactggaaaatgttcggtcgtatcaccaaagaagatattgaacgtaacacccactctctgtactaagtaaggagctaaaaatgtggtatttcgcatggattctgggaacgcttcttgcctgtagctttggggtaatcaccgcgctggcgcttgaacacgtcgaaagtggcaaagccggtcaagaagacatctgatgagtaagattatcgcgactttgtatgcggtaatggacaagcgccccctgcgggcgctttccttcgtgatggcgcttctgttagcaggatgtatgttttgggacccatctcgttttgccgcgaagaccagtgaactggaaatctggcatggtttattgctgatgtgggccgtctgtgctggtgtgattcacggcgtgggctttcgtccgcagaaggttctttggcaagggattttttgcccattgcttgccgatattgttctcattgtcgggctgattttcttcttcttttaaatcagaattctctttaaaaaattatgggccgctccaggcccataaatttttacgctcccttaacttgccctcattcccaaacctcaatcgcgcgcgtatagtagcagcgtttaaaagctctaacttttgttgcattaccgggatgtaaagtgaatacaacgctgtttcgatggccggttcgcgtctactatgaagataccgatgccggtggtgtggtgtaccacgccagttacgtcgctttttatgaaagagcacgcacagagatgctgcgtcatcatcacttcagtcagcaggcgctgatggctgaacgcgttgcctttgtggtacgtaaaatgacggtggaatattacgcacctgcgcggctcgacgatatgctcgaaatacagactgaaataacaagtatgcgtggcacctctttggttttcacgcaacgtattgtcaacgccgagaatactttgctgaatgaagcagaggttctggttgtttgcgttgacccactcaaaatgaagcctcgtgcgcttcccaagtctattgtcgcggagtttaagcagtgactgacatgaatatccttgatttgttcctgaaggctagccttctggttaaacttatcatgttgattttgattggttttagtatcgcatcttgggccattattatccagcggacccgtattcttaacgcagcggcgcgcgaagccgaagcgtttgaagataaattctggtctggaatcgaactctctcgcctctatcaagagagccaggggaaacgggataatctgactggtagcgaacaaatcttttacagcgggttcaaagagtttgtgcgcctgcatcgtgccaatagccatgcgccggaagccgtagtggaaggggcgagccgtgctatgcgtatctccatgaaccgtgaacttgaaaatctggaaacgcacattccgttcctcggtacggttggctccatcagcccgtatattggtctgtttggtacggtctgggggatcatgcacgcctttatcgccctcggggcggtaaaacaagcaacactgcaaatggttgcgcccggtatcgcagaagcgttgattgcgactgcaattggtctgtttgccgctatcccggcagttatggcctacaaccgcctcaaccagcgcgtaaacaaactggaactgaattacgacaactttatggaagagtttaccgcgattctgcaccgccaggcgtttaccgttagcgagagcaacaaggggtaagccatggccagagcgcgtggacgaggtcgtcgcgatctcaagtccgaaatcaacattgtaccgttgctggacgtactgctggtgctgttgctgatctttatggcgacagcgcccatcatcacccagagcgtggaggtcgatctgccagacgctactgaaagtcaggcggtgagcagtaacgataatccgccagtgattgttgaagtgtctggtattggtcagtacaccgtggtggttgagaaagatcgcctggagcgtttaccaccagagcaggtggtggcggaagtgtccagccgtttcaaggccaacccgaaaacggtctttctgatcggtggcgcaaaagatgtgccttacgatgaaataattaaagcactgaacttgttacatagtgcgggtgtgaaaagcgttggtttaatgacgcagcctatctaaacatctgcgtttcccttgcttgaaagagagcgggtaacaggcgaacagtttttggaaaccgagagtgagtaaggcaaccgaacaaaacgacaagctcaagcgggcgataattattagtgcagtgctgcatgtcatcttatttgcggcgctgatctggagtagcttcgatgagaatatagaagctagtgccggaggcggcggtggtagctccatcgacgctgtcttggttgatagtggtgcggtagttgagcagtacaaacgcatgcaaagccaggaaagtagcgcgaagcgttctgatgaacagcgcaagatgaaggaacagcaggctgctgaagaactgcgtgagaaacaagcggctgaacaggaacgcctgaagcaacttgagaaagagcggttagcggctcaggagcagaaaaagcaggctgaagaagccgcaaaacaggccgagttaaagcagaagcaagctgaagaggcggcagcgaaagcggcggcagatgctaaagcgaaggccgaagcagatgctaaagctgcggaagaagcagcgaagaaagcggctgcagacgcaaagaaaaaagcagaagcagaagccgccaaagccgcagccgaagcgcagaaaaaagccgaggcagccgctgcggcactgaagaagaaagcggaagcggcagaagcagctgcagctgaagcaagaaagaaagcggcaactgaagctgctgaaaaagccaaagcagaagctgagaagaaagcggctgctgaaaaggctgcagctgataagaaagcggcagcagagaaagctgcagccgacaaaaaagcagcagaaaaagcggctgctgaaaaggcagcagctgataagaaagcagcggcagaaaaagccgccgcagacaaaaaagcggcagcggcaaaagctgcagctgaaaaagccgctgcagcaaaagcggccgcagaggcagatgatattttcggtgagctaagctctggtaagaatgcaccgaaaacggggggaggggcgaaagggaacaatgctagccctgccgggagtggtaatactaaaaacaatggcgcaagtggggccgatatcaataactatgccgggcagattaaatctgctatcgaaagtaagttctatgacgcaagctcctatgcaggcaaaacctgtacgctgcgcataaaactggcacccgatggtatgttactggatatcaaacctgaaggtggcgatcccgcactttgtcaggctgcgttggcagcagctaaacttgcgaagatcccgaaaccaccaagccaggcagtatatgaagtgttcaaaaacgcgccattggacttcaaaccgtaatcgcgatgttgactgttcggacggtcaacatcaggcaccggttgccacggggttctggtagttttgtgtattttagtttgttaacattctgctaaattatcgtgggccatcggtccagataagggagatatgatgaagcaggcattacgagtagcatttggttttctcatactgtgggcaagtgttctgcatgctgaagtccgcattgtgatcgacagcggtgtagattccggtcgtcctattggtgttgttcctttccagtgggcggggcctggtgcggcacctgaagatattggcggcatcgttgctgctgacttgcgtaacagcggtaaatttaatccgttagatcgcgctcgtctgccacagcagccgggtagtgcgcaggaagtacaaccagctgcatggtccgcactgggcattgacgctgtagttgtcggtcaggtcactccgaatccggatggttcttacaatgttgcttatcaacttgttgacactggcggcgcaccgggtactgtacttgctcagaacagctacaaagtgaacaagcagtggctgcgttatgctggtcataccgccagtgatgaagtgtttgaaaaactgaccggcattaaaggtgcgttccgtactcgtattgcctacgttgttcagaccaacggcggtcagttcccgtatgaactgcgcgtatctgactatgacggttacaaccagtttgtcgttcaccgtagtccgcagccgctgatgtctccggcgtggagtccagacggttctaaactggcttatgtgaccttcgaaagcggtcgttccacgctggttattcagacgctggcaaatggcgctgtacgtcaggtggctagtttcccgcgtcacaacggtgcacctgcattcagcccagacggcagcaaactggcattcgccttgagcaaaaccggtagtctgaacctgtacgtaatggatttggcttctggtcagatccgccaggtgactgatggtcgcagtaacaataccgaaccgacctggttcccggatagccagaacctggcatttacttctgaccaggccggtcgtccgcaggtttataaagtgaatatcaacggcggtgcgccacaacgtattacctgggaaggtagccagaaccaggatgcggatgtcagcagcgacggtaaatttatggtaatggtcagctccaatggtgggcagcagcacattgccaaacaagatctggcaacgggaggcgtacaagttctgagctccacgttcctggatgaaacgccaagtctggcacctaacggcactatggtaatctacagctcttctcaggggatgggatccgtgctgaatttggtttctacagatgggcgtttcaaagcgcgtcttccggcaactgatggacaggtcaaattccctgcctggagcccgtatctgtgataataattaattgaatagtaaaggaatcattgaaatgcaactgaacaaagtgctgaaagggctgatgattgctctgcctgttatggcaattgcggcatgttcttccaacaagaacgccagcaatgacggcagcgaaggcatgctgggtgccggcactggtatggatgcgaacggcggcaacggcaacatgtcttccgaagagcaggctcgtctgcaaatgcaacagctgcagcagaacaacatcgtttacttcgatctggacaagtacgatatccgttctgacttcgctcaaatgctggatgcacatgcaaacttcctgcgtagcaacccgtcttacaaagtcaccgtagaaggtcacgcggacgaacgtggtactccggaatacaacatctccctgggtgaacgtcgtgcgaacgccgttaagatgtacctgcagggtaaaggcgtttctgcagaccagatctccatcgtttcttacggtaaagaaaaacctgcagtactgggtcatgacgaagcggcatactccaaaaaccgtcgtgcggtactggtttactaagagaattgcatgagcagtaacttcagacatcaactattgagtctgagcttactggttggtatagcggccccctgggccgcttttgctcaggcaccaatcagtagtgtcggcagtggcagcgtcgaagaccgcgtcactcaacttgagcgtatttctaatgctcacagccagcttttaacccaactccagcaacaactttctgataatcaatccgatattgattccctgcgtggtcagattcaggaaaatcagtatcaactgaatcaggtcgtggagcggcaaaagcagatcctgttgcagatcgacagcctcagcagcggtggtgcagcggcgcaaagtaccagcggcgatcaaagcggtgcggcggcaagtacgacgccgacagctgatgctggtactgcgaatgctggcgcgccggtgaaaagcggtaatgcaaacacggattacaatgcagctattgcgctggtgcaggataaatcccgccaggatgacgcaatggtggcatttcagaatttcatcaaaaattaccctgatagtacttacctgccaaacgccaattattggctgggtcagttaaactacaacaagggtaaaaaagatgatgcggcgtactattttgctagcgtagtgaaaaactatccgaagagtccaaaggctgcagatgcgatgtttaaagtcggcgtcatcatgcaggacaaaggtgacaccgcaaaagcgaaagccgtataccagcaggttatcagtaaataccctggtactgatggcgctaaacaggcacaaaaacgtctgaacgcgatgtaatgcataacacacgaccagaagtcgcattatttctggtcgtgtcgtgcgaatcataagcagttgagtgatctacatcgaaatttttgttgcgctcaagtctgaaatcagtaatatatgccgccgttgccacgggatatcaaacaaaccgaaagcaacgaaaaagtgggtcgttagctcagttggtagagcagttgacttttaatcaattggtcgcaggttcgaatcctgcacgacccaccaatcgctaaggtggaagcggtagtaaaacgtgaaggataacgttgcatgagcaacggcccgaagggcgagacgaagtcgagtcatcctgcacgacccaccactaacatagttagttgtagtatccagcgtagtatcgggtgattagctcagctgggagagcacctcccttacaaggagggggtcggcggttcgatcccgtcatcacccaccaccgggtcgttagctcagttggtagagcagttgacttttaatcaattggtcgcaggttcgaatcctgcacgacccaccagttttaacatcgaagacagatgttaagcgtgtaggataacgttgcgtcagcaacggcccgtagggcgagcgaagcgagtcatcctgcacgacccaccactaatgacggtgggttcggtggaagtagtttgtagtatccagcgcagtatcgggtgattagctcagctgggagagcacctcccttacaaggagggggtcggcggttcgatcccgtcatcacccaccactcgggtcgttagctcagttggtagagcagttgacttttaatcaattggtcgcaggttcgaatcctgcacgacccaccagttttaacatcaaactcagatgttaagcgtgaaggataacgttgcgccagcaacggcccgtagggcgagcgaagcgagtcatcctgcacgacccaccaatcttaaagattggccccgagtaaaaatctttcaggtaacacccgtatgggtcgttagctcagttggtagagcagttgacttttaatcaattggtcgcaggttcgaatcctgcacgacccaccaatttaaaggtggttactggtagagaacgtgaaggataacgttgcgttagcaacggcccgaagggcgagacgaagtcgagtcatcctgcacgacccaccatcctgaatgattaaggcagcataatcccgcaaggggtcgttagctcagttggtagagcagttgacttttaatcaattggtcgcaggttcgaatcctgcacgacccaccaatgtaaaaaagcgccctaaaggcgcttttttgctatctgcgatactcaaagattcgaacctgcagcaggtttgagttgagcgcagcgaaacaacggagccgctcgcggcgacggcccgaagggcgagcgaagcgagtcatcctgcacgacccaccaatgtaaaaaagcgccctaaaggcgcttttttgctattcaggcatcctcaatttcactttgtaaacctgatgacatcgtcagagcttactgtgcaagcaactctatgtcggtggaattaggcgtaaaatgacgcatcctgcacattaggcgtaattcgagtgacttttccccaccattcgactatcttgtttagcatataaaacaaattacaccgataacagcgaatattacgctaatgtcggttttaacgttaagcctgtaaaacgagatggtaagatgagcgtaatgtttgatccagacacggcgatttatcctttccccccgaagccgacgccgttaagcattgatgaaaaagcgtattaccgcgagaagataaaacgtctgctaaaagaacgtaatgcggtgatggttgcccactactataccgatcccgaaattcaacaactggcagaagaaaccggtggctgtatttctgattctctggaaatggcgcgcttcggtgcaaagcatcccgcttctactttgttagtcgctggggtgagatttatgggagaaaccgccaaaattctcagtccggaaaaaacaattctgatgccgacacttcaggctgaatgtagtctggatctcgactgccctgttgaagaatttaacgcattttgcgatgcccatcccgatcgtactgtcgtcgtctacgccaacacttctgctgcggtaaaagcgcgcgcagattgggtggtaactagtagcattgccgtcgaacttattgatcatcttgatagtttgggtgaaaaaatcatctgggcacccgacaaacatctggggcgttacgtgcaaaaacagacgggtggagacattctatgctggcagggtgcctgtattgtgcatgatgaatttaagactcaggcgttaacccgcttgcaagaagaatacccggatgctgccatactggtgcatccagaaagtccacaagctattgtcgatatggcggatgcggtcggttccaccagtcaactgatcgctgctgcgaaaacattgccacatcagaggcttattgtggcaaccgatcggggtattttctacaaaatgcagcaggcggtgccagataaagagttactggaagcaccaaccgcaggtgagggtgcaacctgccgcagctgcgcgcattgtccgtggatggccatgaatggccttcaggccatcgcagaggcattagaacaggaaggaagcaatcacgaggttcatgttgatgaaaggctgcgagagagggcgctggtgccgctcaatcgtatgctggattttgcggctacactacgtggataacgaataataaggcgtaacgttacgctttgggggaaagatggatttttttagtgtgcagaatatcctggtacatataccaataggggcaggcggttatgatctcagttggatcgaagcggtaggcacgatcgccgggttgctgtgtattggccttgccagtctggagaagatcagcaactacttctttggcctgatcaacgtcaccttgtttggcattattttctttcagattcagctgtatgccagcctgctattacaggtgtttttctttgccgcgaatatttacggttggtatgcgtggagccgacaaaccagtcagaacgaggcggagttgaaaattcgctggttgccattgccgaaggcactcagctggttggcggtttgcgttgttagcattggtctgatgacggtatttatcaatccggtgtttgcatttttgacccgcgtggcagtcatgatcatgcaagcattaggattacaggttgtgatgcctgaactgcaaccggacgctttcccgttctgggatagttgcatgatggtgttatctatcgtggcaatgattctgatgacgcgtaagtatgtggaaaactggctgttgtgggtgattattaacgtgattagcgtcgttatttttgcacttcagggcgtttacgccatgtctctggagtacatcatcctgacctttattgcgctcaacggcagccggatgtggatcaacagcgcacgtgaaagaggcagtcgcgcgctgtcccattaatggtgatgatgactatggccagacaccccttcattcaggtggcagtctggcccatgacaaggttgatattccatctgaatggtggcgtgctcaatctgatagtgatccatcaggtagtgttggatctgatccaacaaggcatcgtgatcgtgtggcgggatcacctgcacatgcaacgtcatcaccggcttctcgcctaccatccatacatgtacatggtgcacattgcggacttccgggatttcccggcacatacgacgcttcagttcagcgatatccaggcttaccggtgcaccttcaagtaattcattcacgctatctttcaacagtcgccacgcgctacgcagaaccagaaggctcaccagtatgctgagaatggggtcagcaggtgtccagccagtccagataataatcaacgcggcaataatagccccaacgctacccagcaggtccccgagcacatgcagtgccgctgctcgtacgttgaggtttttctcttcgctgccgtgatgaagtaaccagaaagaaagtatatttgccagcaacccagccacggcaattgccatcatcatgccgccctcgaccggacgcggcgtgcggaagcgttctatcgcctcccagacaatcaaaatggtaattaccacgagggctatggcattcacaaacgccgcgagcgtggtcagtcttagccaaccgaaagtgtggcgaatggtgggaggacgacgactaaattgcacggcgagtagggcgaaaagcagggcggcagtatcggtcaacatatgacccgcatcggccagcaatgccagagaaccagaaagaaaaccaccaacgacttctaccagcataaacccggcagtcacgccgaaagcatacaacaagcgacgagcattattatcttctggcaggtgactggacgtgtgactgtgactgtgcgccatgacgagtcatcccttaattattctcacttaactttatgacatcatactgcttttagaagtgaaaaattaaaagggagagactccgctctcccattattggctattttgcagggttactgcgtggtaccgtcggttttggtatcgacatcattattgatgccatcaccggtttgtacctttttattgatatccggacagcgaccatctttgcacatggtgttcttgtgctcttcatctttggtcattccgtcattgttcatactagaaccatcgctatgcagcattgtgccgccagaaccggtatttaccccgttattgtcgacgttatttggcgcgacattttcacgggcgtcaggggctacctggcccgcatcagctgcggcgtttgcctggccgttattagtttgcgctccgctatcggcagccagtgcggcaccgctggcaaggcttagagtggcagtcagaaataatgtggccagttttgtcattttcataggatgctcctgttatggtcgttatgtcggataacctcttccaacagtgcatttgcaggtgaatataaggcattggtttaagatttcagccaggttatgaaacgcagcagagaatcttgaaataattaacaaacaaaggagttacagttagaaattgtaggagagatctcgtttttcgcgacaatctggcgtttttcttgctaattccaggattaatccgttcatagtgtaaaaccccgtttacacattctgacggaagatatagattggaagtattgcattcactaagataagtatggcaacactggaacagacatgaattatcagaacgacgatttacgcatcaaagaaatcaaagagttacttcctcctgtcgcattgctggaaaaattccccgctactgaaaatgccgcgaatacggttgcccatgcccgaaaagcgatccataagatcctgaaaggtaatgatgatcgcctgttggttgtgattggcccatgcagtattcatgatcctgtcgcggcaaaagagtatgccactcgcttgctggcgctgcgtgaagagctgaaagatgagctggaaatcgtaatgcgcgtctattttgaaaagccgcgtaccacggtgggctggaaagggctgattaacgatccgcatatggataatggcttccagatcaacgacggtctgcgtatagcccgtaaattgctgcttgatattaacgacagcggtctgccagcggcaggtgagtttctcgatatgatcaccccacaatatctcgctgacctgatgagctggggcgcaattggcgcacgtaccaccgaaagccaggtgcaccgcgaactggcaagtgggctttcttgtccggtcggcttcaaaaatggcaccgacggtacgattaaagtggctatcgatgccattaatgccgccggtgcgccgcactgcttcctgtccgtaacgaaatgggggcatagcgcgattgtgaataccagcggtaacggcgattgccatatcattctgcgcggcggtaaagagcctaactacagcgcgaagcacgttgctgaagtgaaagaagggctgaacaaagcaggcctgccagcacaggtgatgatcgatttcagccatgctaacagctccaaacaattcaaaaagcagatggatgtttgtgctgacgtttgccagcagattgccggtggcgaaaaggccattattggcgtgatggtggaaagccatctggtggaaggcaatcagagcctcgagagcggggagccgctggcctacggtaagagcatcaccgatgcctgcatcggctgggaagataccgatgctctgttacgtcaactggcgaatgcagtaaaagcgcgtcgcgggtaaggtttaattgtcggatgcgccgtcagagtggcgtatccgatgaatcaccacaggcctgataagtcgcgcagcgtcgcatcaggcaatgtgctccattgttagcaacaaaaaagccgactcacttgcagtcggctttctcattttaaacgaatgacgtttacttcgctttaccctggtttgcaaccgccgctgctttcgctgcgatctcgtcagcattacccagataatagcgtttcagcggtttgaaattctcgtcgaactcatacaccagcggcacgccagtcgggatattaagctcaagaatctcttcttcgctcatgttatcaagatatttcaccagcgcacgtaaagagttaccgtgtgcagcgatgatcacgcgctcaccgctcttcatacgcggcagaatagtttcattccagtaagggatcacgcggtcaatggtcagcgccaggctttccgtcagcggcagttctttctcgctcagtttcgcgtaacgcggatcgtgacccggataacgctcatcatctttagtcagttccggcggagtcactgcaaaaccacgacgccactgtttcacctgctcgtcgccatacttttcagcagtttccgctttgttcagaccctgcaacgcaccgtagtgacgttcgttcagtttccaggatttctcaacgggcagccatgcctgatccagttcgtccagcacattccacagggtatggatagcgcgtttcagcacagaagtgtaagcaaagtcaaagctgtaaccttcctctttcagcagcttacctgctgcttttgcttcgcttacgcctttctcagacagatccacgtcgtaccaaccggtgaaacggttttctttgttccactgactttcgccatgacgaaccagaaccagcttagttacagccatatacttactcctcaaatcatcttttaatgataataattctcattatattgccgcgacgaagcaacagcaatgcttacgcataaccatagcgaaaatagtggcgcagtgtaaggttgttgtgaatattgagttgcaaatatgtcggtgtttgctggtgatttgaacaatatgagataaagccctcatgacgagggcgtaacattactcagcaataaactgatattccgtcaggctggaatactcttcgccaggacgcaggaagcagtccggttgcggccattcagggtggttcgggctgtccggtagaaactcgctttccagagccagcccttgccagtcggcgtaaggttcggttccccggctcggtgtgccgccgaggaagttgccggagtagaattgcagagccggagcggtggtgtagaccttcagctgcaatttttcatctgcactccagacatgcgccgccactttcttgccatcgcctttggcctgtaacaagaatgcgtgatcgtaacctttcactttgcgctgatcgtcgtcggcaagaaactcactggcgatgattttggcgctgcggaaatcaaaagacgttccggcgacagatttcaggccgtcgtgcggaatgccgccttcatcaaccggcagatattcgtccgccagaatctgcaacttgtgattgcgcacgtcagactgctcgccgtcaagattgaaatagacgtgattagtcatattcaccgggcaaggtttatcaactgtggcgcgataagtaatggagatacggttatcgtcggtcagacgatattgcaccgtcgcgccgagattacccgggaagccctgatcaccatcatcactactcagggcaaacagcacctgacgatcgttctggttcacaatctgccagcgacgtttgtcgaacccttccggcccgccgtgcagctggttaacgccctgacttgggctaagcgtcacggtttcaccgtcaaaggtataacggctattggcgatacggttggcataacgaccaatagaggcccccagaaacgcggcctgatcctgatagcattccgggctggcacagccgagcagcgcctcgcggacgctgccatcggaaagcggaatacgggcggaaagtaaagtcgcaccccagtccatcagcgtgactaccatccctgcgttgttacgcaaagttaacagtcggtacggctgaccatcgggtgccagtgcgggagtttcgttcagcactgtcctgctccttgacttggtttacaaacgtaaaaagtctctttaatacctgtttttgcttcatattgttcagcgacagcttgctgtacggcaggcaccagctcttccgggatcagcgcgacgatacagccgccaaatccgccgccggtcatgcgtacgccacctttgtcgccaatcacagctttgacgatttctaccagagtgtcaatttgcggcacggtgatttcgaaatcatcgcgcatagaggcatgagactccgccatcaactcgcccatacgtttcaggtcgccttgctccagcgcgctggcagcttcaacggtgcgggcgttttcagtcagtatatgacgcacgcgttttgccacgatcgggtccagttcatgcgcaacagcgttgaactcttcaatggtgacatcacgcagggctggctgctggaagaaacgcgcaccggtttcgcactgttcacgacgggtgttgtattcgctgccaaccagggtacgtttgaagttactgttgatgatgacgacagccacacctttgggcatggaaactgctttggtccccagactgcggcaatcgatcagcaaggcatgatctttcttgccgagcgcggaaattagctgatccatgatcccgcagttacagcctacaaactggttttctgcttcctgaccgttaagcgcgatttgtgcgccgtccagcggcagatgataaagctgctgcaatacggttccgaccgcgacttccagactagcggaagaacttaacccggcaccctgcggcacattgccgctgatcaccatgtccacgccgccgaagctgttgttacgcagttgcagatgtttcaccacgccacgaacgtagttagcccattgatagttttcatgtgcgacaatgggcgcatcgagggaaaactcgtcgagctgattttcataatcggctgccatcacgcgaactttacggtcatcgcgtggtgcacaactgatcacggtttgataatcaatcgcgcagggcagaacgaaaccgtcgttgtagtcggtgtgttcaccaatcaaattcacgcggccaggcgcctgaatggtgtgagtggcagggtagccaaatgcgttggcaaacagagattgtgttttttctttcagactcatttcttacactccggattcgcgaaaatggatatcgctgactgcgcgcaaacgctctgctgcctgttctgcggtcaggtctcgctgggtctctgccagcatttcataaccaaccataaatttacgtacggtggcggagcgcagcagaggcggataaaagtgcgcgtgcagctgccagtgttgattctcttcgccattaaatggcgcgccgtgccagcccatagagtaggggaaggagcactggaagaggttgtcataacgactggtcagctttttcaacgccagcgccagatcgctgcgctgggcgtcggtcaaatcggtgatccgtaaaacgtgggctttgggcagcagtagcgtttcgaacggccaggcagcccagtaaggcacgacggctaaccagtgttcggtttcgacaacggtacggctaccgtctgccagctcgcgctgaacataatccaccagcattggacttttctgttcggcaaaatattctttttgcaggcggtcttcgcgctcagcttcgttaggcaggaagctatttgcccaaatctgaccgtgcggatgcgggttagagcagcccatcgccgcgcctttgttttcaaaaacctgcacccatgggtacgttttccccagttctgcggtttgctcctgccaggttttgacgatttccgtcaatgctgcaacgctgagctctggcagcgttttactgtgatccggactaaagcagatcacccggctggtgccgcgcgcgctctggcaacgcatcagcggatcgtgactttctggcgcatctggcgtgtcagacatcaaagccgcaaagtcattagtgaaaacgtaagtcccggtgtaatcggggtttttatcgcctgtcacccgcacattacctgcgcagaggaagcaatctggatcgtgcgcaggtaacacctgtttggctggcgtttcctgcgccccctgccaggggcgcttagcgcggtgcggactaaccagaatccattgcccggtgagcgggttgtagcggcgatgtggatgatcaacgggattaaattgcgtcatggtcgttccttaatcgggatatccctgtggatggcgactctgccagtgccaggtgtcctgcgccatttcatcgagtgtgcgcgttacgcgccagttcagttcacggtcggctttgctggcgtccgcccagtaggccggaaggtcgccctcgcgacgcggtgcaaaatgataattaaccggtttgccgcaggctttgctgaaggcattaaccacgtccagcacgctgttgcctacgccagcgccgaggttgtagatgtgtacgcctggcttgttcgccagtttttccatcgccacgacgtgaccgtccgccagatccattacgtggatgtaatcgcgtacgccagtaccatcttcggtcggataatcgttaccaaaaatcgccaggctgtcgcgacggcctacagcaacctgggcgatgtatggcatcaggttattcggaatgccttgcggatcttcgcccatatcgccgctcggatgcgcgccaaccgggttgaagtagcgcagcagggcaatgctccagtccggctgggctttttgcagatcggtgaggatctgttccaccatcagcttgcttttgccgtaagggctttgcggtgtgccggtcgggaagctttcaacgtatggaattttgggctgatcgccataaacggtggcggaggagctaaaaataaagtttttgacgttagcggcgcgcatggcgctaatcaggcgcagagtgccgttgacattgttgtcgtaatattccagcggtttttgtacgctttcgcccacggctttcagcccggcgaagtggatcacggtgtcgatagcgtgatcgtgcaggatctcggtcatcaacgcttcgttacgaatatcgccttcaacaaacgttggatgtttgccgcctaaacgctcgataacaggcagtacgatgcgcttactgttacagaggttatcaagaatgatgacatcatgaccgttttgcagtaattgcacacaggtatgacttccaatgtaaccgctaccaccggtaaccagaactctcataattcgctccattaggcttatggtatgaaataaccatagcataacaaagatgcgaaaagtgtgacatggaataaattagtggaatcgtttacacaagaatttagccgttttttatgcgcgattaagtgattataaaacagagggtttatgaatgattgcgctttttatctgaaaaaagacgcggtttcatgcctgcatgcgtcgaaccgttggccggagagggtgctaaggccgcctccggcaaggtcagcactaccgactcaatatatttttgtcagcacatagcgatagagtccaccgtccggcacgaactcaagacgatgggtaatacaggcaggcgcatcttcagcgtggtggctaacaaacaacaattgcgtttcaccttcgctaatcagcacatcaacaaaacggcggataagctggcgattcagcggatcaagcccctgtagtggttcatcgagaataagcaacgtcggatgtttcaccagtgcgcggacaatcagcgccagacgctgctgtccccaggaaagactatggaacggagcgtcagccgtgcgtttatcaatgccgagaatatccagccactgctgcaccagtttttgctggcgatcgctaacggcctgataaatgccaatgctatcaaaatagccagaaagaatcacattacgcacggtagtgctgacccggtaatccagatgcaaactactgctgacgtaaccgatatgctttttgatatcccagatggtttcgccgctgccgcgacgtcgtccgaaaagcgtcaaatcgttgctgtaaccttgcggatgatcgccagtaaccaggcttaataacgtgctttttcctgcaccatttggcccgacaatttgccagtgttcgcctggattcacctgccagctaaggttattaagaatggggcgatcgttataagaaaccacgccattgttcagcacaatgcgcggttcgttggcgggtaaggcgtgacgtgcactaggttcatccggctccggcagttgcacaccttcaagctgttcactatgcgccagttgcgcgacgagtgcttgttggagcagttcctctttagcgccagtttccgctaacgtgcaatccgccagcacgccagcaaactggacaaactccgggatctcatcgaagcgattgagcaccagtaccagagtaataccggactgatgtaagctggcgagtcgctcagccagctgctgacgactggcaacatccaggccatcgaacggctcatcaagaatcaacaagtcaggctcgctcatcagcgcctgacacagcagggtttttcgcgtctcgccagtggaaaggtatttaaagcgtcggtcgaggagggcggtaataccgaactgctgcgccagttgcatgcaacgcggtgcatcctttacttcatcctgaatgatctcagccgtagtgcgtccggtgtcatcttcgccagggccgagcatatcggtgttattccgctgccattcgtcgctgacgagtttttgcaattgctcgaaggagagacgagtgatgtgggaaaactggctttgccgttcacctttcaaaagcggaagttcccccgccagcgcgcgggccagggcgcttttcccgcttccattgctaccgacaaacgcccaactatcacccgcgtttaacgttagctgaggcaattgcagcgtttttgtgtcgctaagacgaaacgtgccttgcaaaatttgcaagctactcattttatatcccactttgtgcagcgattactgacagggatacgtgtttcataacaaattgtcaacacgcttagcacagcgtggcgataatcacgctgtcggcattaaagtaggccgtgacattctgtccttgctgaagagaagtcgcttcatttaccggcactgtggcgcacagtgtttgcccgtcgggtagcgccattaatacttcgcactgctctgcgccgcgctcaatatgactaataatacccggtaattggttgtcagcgttttgcgcgaccgcctcgtcctgagtaatacctacccacggcgcttttagcaatatcaacacttctttgccttcatccagccccagacgcgcgccgctttgtgcggtaattgcgactttcaggcgtgtttttccgtcagccagtaagacatcaacatgctgttgaacgtcatcatgatcgcgggcggtgatggtaccgaaccactggttacgggcgctggtttgcagactaaaacgactgatcgcggccagcaggctgttcagcggcagggcgtcatcgtcacttaacacatcaaaggctttttgctggatttgcgccagtaagtcatagagctgaatcagtcgctgaccatagcgggtcagtactgcgccgccgccacctttaccgcctgttgcgcgctcgaccagaatatgctcacttaactgattcatctcgttaatggcatcccaggcgcttttatagctaataccggcatctttcgctccctggctaatggaaccggaaagcgcaatgtgttttagtaggctaatgcggcgcgggtcggcgaataatttttgttggagcttaagggtgagaaggatttcggcctgcataacaatgtcctggcaaaagtcttattgtgacggaaaacgaacgccacgcaaagctgaccgcacaaaaggggagtgcttttctgtgcttagcggttagaatagtctcatgactatatctggagttgaccatgttagagttattaaaaagtctggtattcgccgtaatcatggtacctgtcgtgatggccatcatcctgggtctgatttacggtcttggtgaagtattcaacatcttttctggtgttggtaaaaaagaccagcccggacaaaatcattgattccctgaatgcccgcttagtcgggcattttctttttctcaacttcctgcttttcctgccgatattttttcttatctacctcacaaaggttagcaataactgctgggaaaattccgagttagtcgttatattgtcgcctacataacgttacattaaggggttaccaatggctcgtaaatggttgaacttgtttgccggggcggcactctctttcgctgttgctggcaatgcactggcagatgaagggaaaatcacggtgttcgccgccgcaagtctgactaacgcaatgcaggacattgctacgcagtttaaaaaagagaaaggcgtggatgtggtttcttctttcgctagcagttctactctcgcccgtcagattgaagcgggtgcgcctgcggatctgtttatttctgccgatcagaaatggatggattatgcggttgataaaaaagcgatcgatacagctacgcgtcagacactgctcggcaatagcctggtcgttgtagcaccgaaagccagcgtgcagaaagatttcaccatcgacagcaaaaccaactggactagtctgctgaatggcggtcgcctggcggttggcgatccggaacatgttcccgctggcatttatgcaaaagaagcactgcaaaaactgggcgcatgggatacgctctctccgaaactggccccagcggaagatgttcgtggggcgctggcgctggtcgaacgtaacgaagcgcctctgggcattgtctacggttctgacgcagttgccagcaaaggggtaaaagtggttgccaccttcccggaagatagtcataaaaaagtggaatatccggttgctgttgtggaagggcataacaatgcgacagtgaaagcattttatgattatctgaagggaccgcaggcagcggaaatctttaaacgttacggatttacaatcaagtaatgatactgaccgatccagaatggcaggcagttttattaagcctgaaagtttcttccctggctgtgctgtttagcctgccgtttgggatcttttttgcctggttactggtgcgttgcacgtttccgggcaaagctctgctcgacagcgtactgcatctaccgctggtgttaccgcccgtggtcgtcggttacttattattagttagcatgggacggcgcggatttatcggtgaacgtctgtatgactggtttggtattaccttcgcctttagctggcgcggcgcggttctcgctgccgccgtcatgagctttccgctgatggtgcgggcaattcgtctggcgctggaaggggttgatgtcaaactggaacaggccgcaagaacactgggggccgggcgctggcgcgttttctttactatcacgttaccgctgaccttaccgggaattattgttggtacggtactggcttttgctcgttctctcggtgagtttggtgcaaccatcacctttgtgagcaacattcctggtgaaacgcgaaccattccttctgccatgtataccctgatccagacccccggcggggaaagtggagcggcgagactgtgcattatttctattgcgctggcgatgatctccctgttgattagtgaatggctggccagaatcagccgtgaacgggcggggcgctaatcatgctggaactgaatttttcccagacgttgggcaaccattgcctgactattaatgaaacgctgcccgccaatggcatcactgctatctttggcgtctccggtgccggaaaaactagcctgattaacgccatcagtggactgacgcgcccgcaaaaagggcggattgtcctcaatgggcgggtactaaatgatgccgaaaaaggtatctgcctgacgccggaaaagcgtcgcgttggctatgtttttcaggatgcgcggctgttcccgcattacaaagtgcgtggcaatctgcgctacggcatgagcaaaagtatggtcgatcagttcgataagctggtggcgcttttaggcattgaaccgttgcttgaccgtttaccaggcagcctgtccggaggcgaaaaacagcgcgtggcgattggtcgggctttgctgacagcaccggaattgctgttgctggatgaaccgctggcgagtctggatattccgcgtaaacgcgaactgttgccttatctgcaacggctgacacgggaaatcaacattccgatgttgtatgtcagccatagcctggatgagatcctccatctggcagacagagtgatggtactggaaaacggtcaggtgaaagcctttggcgcgctggaggaagtgtggggcagtagcgtgatgaatccgtggctgccgaaagagcaacaaagtagcattctgaaagtgacggtgcttgagcatcatccgcattacgcgatgaccgcgctggcgctgggcgatcagcatttgtgggtcaataagctggacgaaccgctgcaagctgcgctacgtatccgcattcaggcttccgatgtttctctggttttacaaccgccgcagcaaaccagcattcgtaacgtattgcgggcaaaagttgttaatagttatgacgacaacggccaggtggaagtggaactggaagtcggcggtaaaacgctgtgggcgcgtatcagcccgtgggccagggatgaactggcgatcaaacctggcctgtggctgtacgcgcaaattaaaagtgtgagcataaccgcctgattaaatcaggtggctataaatgaactgggcaatgctgtcggtggtgttatcaccaatcacaatgttggcgcgcgcttttaccgcgtcatcggcgttgcccatcgccacgcctgtaccagcggcttccagcatactgatatcattaaagttatcgccgaatgccacgacgttttccatgctccaaccttgcgcctcaacccatttcgtcaaacgtttacctttgctgttgccgccgcgtgcaatatcaacctgatcgtgccaggaccattcacactccagtcccagttcatgttcgacatgcttaccaaaatgctgcaattgcggcaggtcatcgtgcgtcagggcgaacttccatacggcgttaacttgttgcgccgtttcagccagagaagcgacttgtgtgaaagtcggacgctgttccggcggcagggtttgcgcccagttagatgtgcgaatgacatgcccggtcgggtgctcatagaccattgcatcatcgacatacatcagaccgtgaatgtggtgttcattcagcatctcaatgagttgcagggctttaataacgggcattgggtccgcttccagcacggtttttgcatgataatcatacaaataggtgccattacagcaaatagcaggtgtatccagcgccagcgcctgataaaaaggatgaatagcgacgtgatggcgacctgtgacgatgattaattgatagcctgcttcgcgagcgcgggccagggcttctatgctactaggaagcagggtctttttcggggtcaataaggtgccgtctaagtcgagagcaatcacgcgtgtggtcatggcgtattccagattaaggttaagaattttcgtctgcgcgaatggtacaccgataccactatcggacaaaattctgcgttttaattcagcattcaccgccaaaagcgactaattttagctgttacagtcagttgctaaatgcaaaggagcattcatgaagcaaacagtttatatcgccagccctgagagccagcaaattcacgtctggaatctgaatcatgaaggcgcactgacgctgacacaggttgtcgatgtgccggggcaggtgcagccgatggtggtcagcccggacaaacgttatctctatgttggtgttcgccctgagtttcgcgtcctggcgtatcgtatcgccccggacgatggcgcactgacctttgccgcagagtctgcgctgccgggtagtccgacgcatatttccaccgatcaccaggggcagtttgtctttgtaggttcttacaatgcgggtaacgtgagcgtaacgcgtctggaagatggcctgccagtgggcgtcgtcgatgtggtcgaggggctggacggttgccattccgccaatatcagtccggacaaccgtacgctgtgggttccggcattaaagcaggatcgcatttgcctgtttacggtcagcgatgatggtcatctcgtggcgcaggaccctgcggaagtgaccaccgttgaaggggccggcccgcgtcatatggtattccatccaaacgaacaatatgcgtattgcgtcaatgagttaaacagcagtgtggatgtctgggaactgaaagatccgcacggtaatatcgaatgtgtccagacgctggatatgatgccggaaaacttctccgacacccgttgggcggctgatattcatatcaccccggatggtcgccatttatacgcctgcgaccgtaccgccagcctgattaccgttttcagcgttagcgaagatggcagcgtgttgagtaaagaaggcttccagccaacggaaacccagccgcgcggcttcaatgttgatcacagcggcaagtatctgattgccgccgggcaaaaatctcaccacatcagcgtatacgaaattgttggcgagcaggggctactgcatgaaaaaggccgctatgcggtcgggcagggaccaatgtgggtggtggttaacgcacactaaccgctgatttacccggcgcagtctctcctgcgccggtgtattaacctatctcctgtaacgcgtgtctctggcgttcgacgatattggtccacaaattgtctttatcgtcagtccataaattaatcagcaaggcaaaaaagcgttctgctgctggagaaagtacggcatctttacggcgaattattcccaatgttcgacgtataacgggttccaccaatgggataccaataatgctagaatagggcgcatgaggcattgccaggccaggaagcgcgctaatccccagtcccgcctccaccagtcctaaactcgtgctaagatgacgcacttcgtaaaaccagtccagcttccagggcttgtcggccagctgttgttctatcaacagtcggttgccgctggaggagcgtacgccaatcattttgtaacccactaactcctgccattctacaagctgctttttggccaatggatggtcacgccgacaggccagcacgaacggctcgttgaccagtggggtaaaatcaatggaactatttgtgacgttgttcatgtttatgccaaagtcactttcgttacacagcacgctttccatgcaattattcgtgccttgttccagaatccgcactttaatattgggatacagctcattaaatttaccgattgccagcggtaaaaaataaaatactgcggtcggaatacacgctaacgtcaccataccacgatgataagcattcatatcacgaatattaaaaagcgtttcatcgaatttctttattaattcccgcgcctccgggagcaacctttttcctgcttttgttaacgtaaccttgcgagttgtacgctcaaatagttgaacatgtaaatcttcctccatcttttttattcttcgcgttaatgcaggttgcgtaatattgagtaatttagcggcattgttaaagctactggactctgccagtatgacaaatgccttcatactacttaattcatgcttcattattactccggaaaatggaaggctgctttttgggtggctggccgttaaaaattttaactgcatttagccaacttaaattaatgaaaaaatgttattaatcgttgagctaaagtcattagagatgctttgcccttaatgtaaccatatcgcaataagttatgtttttaaattgagggcattattatgaaaaaaataccctgcgtgatgatgcgaggtggaaccagcaggggcgcgttcctgttagcggaacatttacccgaagatcaaacgcagcgcgataaaatattgatggcaattatgggttccggtaacgatctggaaattgacggtattggcggcggtaatccactgaccagtaaagtcgccattattagccgttccagcgatccgcgtgctgatgtcgattatctgtttgcgcaggtaatcgttcatgagcaacgtgtcgataccacgcctaactgcggcaatatgctgtctggtgttggggcattcgccattgaaaatggtttgattgcagcgactagcccagttactcgcgtacgtatccgcaacgtcaatacgggtacgttcatcgaagctgatgtgcaaacgccaaatggtgttgtcgagtacgagggtagcgccagaattgacggcgtaccgggtactgccgcaccggttgcgctcactttcctgaatgccgctggaaccaaaaccggaaaagttttcccgactgataatcagattgattattttgacgatgtcccggtgacctgtatcgatatggcgatgccagtcgtcattattccggctgaatatctgggaaaaacaggttatgaattaccggcggaactggatgccgacaaagcattattagcccgcattgaatctatccgtctacaagcgggtaaagcaatgggcttaggtgatgtcagtaatatggttatccctaaacctgtgcttatttctccagcgcagaaaggcggggcaattaatgtgcgttattttatgccgcattcttgccatcgcgcgctggcgataaccggtgctattgctatttccagtagttgtgcattggaaggcaccgtcacccgacaaatcgtcccttctgtaggatacggcaatatcaatattgaacaccccagtggtgcgctcgacgttcatttaagtaatgaaggtcaggatgccacgacgttacgcgcatctgttattcggacgaccagaaaaatattttccggtgaagtttatcttccctgaaaaaattcgttgtcaggataaggacaatcaataaaggacttctgtatgagtcatacagaaagaacaggattttaaatgaataagaaaagcttatggaagctaattctgatattagcgatcccatgtattattggttttatgccagctccggcaggattaagcgaactggcgtgggtgctttttggtatttacctggcggccattgtggggctggttatcaagcctttcccggaacctgtcgtactgttaattgccgttgctgccagtatggtggtggtcggtaacttatccgacggtgcgtttaaaaccaccgccgtattaagcggttactctagtggtaccacctggctggtgttcagcgcgtttaccttaagcgccgcatttgtgaccaccggtttaggtaaacgtattgcctatctgctgattggtaaaatcggtaacaccacgctgggtctgggttacgttacggtattcctcgatctggtactggctccggcaacaccgtctaacaccgcgcgtgcgggcggcattgtgttaccgatcatcaacagcgtggcggtggctttggggtccgaaccggaaaaaagtccgcgtcgtgtcggacattacctgatgatgtccatttacatggtcaccaaaaccaccagctatatgttctttaccgcaatggcggggaacattctggcgctgaaaatgatcaacgacattctgcacctgcaaattagctggggtggatgggcgctggcagccggattgccgggcatcattatgctgctggtcaccccgctggtgatttacaccatgtatccaccagaaattaagaaggtggataacaaaaccatcgctaaagcgggccttgccgaactaggaccgatgaaaatccgcgaaaaaatgctgctcggtgtctttgtgctggcgctgctgggctggattttcagtaagtctctgggggttgatgaatccaccgtggcaatcgttgttatggcaaccatgctgctgctgggtatcgttacctgggaagacgtggttaaaaataaaggcggctggaataccttaatctggtacggcggtattatcggcttaagctccttattaagcaaagttaaattcttcgaatggttagctgaagtctttaaaaataacctggcatttgatggtcacggtaacgttgctttcttcgttattattttcctcagcattatcgtgcgttatttcttcgcttccggtagtgcctatatcgttgctatgttaccggtatttgccatgctggcgaacgtctccggcgcaccgttaatgttaaccgcgctggcactgttgttctccaactcctatggcggcatggttactcactatggcggcgcggcaggtccggtcatctttggcgtgggttataacgatattaaatcctggtggttggtcggtgcggtactgacgatattaaccttcctggtgcatatcaccctcggcgtgtggtggtggaatatgctgatcggctggaacatgctgtaaatattctcgtcatacttcaagttgcatgtgctgcgtctgcgttcgctcaccccagtcacttacttatgtaagctcctggggattcactcgcttgtcgccttcctgcaactcgaattatttagagtatatccatttattatctttctgcgcacttcacggtgcgcagatatctggagcatttgatgatcaagttatctgaaaaaggcgtgtttctcgccagtaataacgaaataattgccgaagaacatttcaccggcgaaattaaaaaagaagaagccaaaaaaggcactattgcctggtctattctctctagccataatacgtccggaaatatggataaacttaaaattaagtttgatagtttagcctctcacgatattacctttgttggtattgtacagaccgctaaagcgtccggtatggaacgtttcccgctgccgtatgtgctgaccaactgccataacagtctctgcgccgtcggcggcactattaacggtgatgaccatgtttttggtttaagcgcggcccagcgttatggcggtatttttgtgcctccgcatattgcggtcatccatcaatatatgcgtgagatgatggcaggcggcggcaaaatgatcctcgggagtgacagccacacccgttacggtgcattagggacaatggcagtcggtgagggcggcggtgagttggtaaaacagctgcttaatgacacctgggatatcgactatccgggcgtggttgcggtgcatctgaccggaaaacctgcgccgtatgtggggccacaggatgtggcgctggctatcattggcgcggtgttcaaaaacggttacgtcaaaaacaaagtcatggagttcgttggaccgggcgttagcgcgctctctaccgatttccgtaacagcgttgacgtgatgaccactgaaacgacctgtttaagttctgtctggcaaaccgatgaagaagtccataactggctggcgctgcacggtcgcggccaggattactgccagcttaaccctcaaccgatggcgtactacgatggctgcatcagcgttgatttaagcgccatcaaaccaatgattgcgctgccgttccacccgagcaacgtgtatgaaatcgacacactgaaccagaacctgaccgacattctgcgtgagattgaaattgagtccgaacgcgtggcgcacggtaaagccaaactcagcctgctggataaagtggaaaatggtcgcctgaaagtgcagcaggggattatcgcgggctgttctggcggtaactacgaaaacgtcatcgcggcggcgaatgcactgcgcggtcaatcctgtggcaatgacaccttcagcctggcagtttacccgagtagtcagccggtgtttatggatctcgccaaaaaaggtgtggtagcagatttgattggcgcaggcgcaatcatcagaaccgcgttctgcggcccatgctttggcgcgggcgatacgccaatcaacaacggtttgagtattcgccacaccacgcgtaacttcccgaaccgcgaaggctctaagccagctaatgggcagatgagtgcggtggcgttgatggacgctcgttctatcgctgcgactgcggcaaacggtggctatttaacctctgccagcgaacttgattgctgggacaacgtgccggagtacgccttcgatgtaacgccgtataaaaaccgtgtttatcagggctttgtgaaaggggcaactcagcaaccgctgatttacgggccgaacattaaagactggccggaattgggtgcgctgactgacaatatcgtcctgaaagtgtgcagcaagatcctcgacgaagtgaccaccaccgacgaactgattccttccggtgaaacctcttcttatcgtagtaatccgattggtctggcggagtttaccctgtctcgccgcgatcccggttatgttagcagaagtaaagcgactgctgagctggaaaatcagcgtctggcggggaatgtcagcgagctgacagaggtgtttgcgcgcattaagcagattgctggtcaggagcatattgatccgctgcaaactgaaattggcagcatggtctatgcggtgaaaccaggcgatggttctgcgcgtgaacaggcggcgagctgccagcgtgtgattggcggtctggcgaatattgccgaggagtacgcgactaaacgctatcgttctaacgtcatcaactgggggatgttaccgctgcaaatggcggaagtaccaacctttgaagtgggggattacatttacatccctggcattaaagcggcgctggataatccgggtacgacgtttaaaggttatgtgatccatgaagatgcgccggtaacggaaattacgctctatatggaaagtctgactgctgaagagcgcgagattatcaaggcgggtagtttgattaacttcaataaaaaccgtcagatgtaaaaagcgccatgtgaatgtaggtcgcattcggcacttattgtcggatgcgatgcttgcgcatcttatccgacctacgaatcgcatcgaatctgtaggccagataaggcattttcgcagcatccggcacttattgtcggatgcgatgcttgcgcatcttatccgacctacaaatcgcatcgaaccgtaggccggataaggcgtttacgccgcatccggcaaatagttaattgcccttacttcttcgcctctgcaaccactttactacccacgccgcggttattgtattcccacatgcggttgtagttagtgtcattcagattgcgctgtatttcgtcgttatcatctacgctgccggtattacccgcaaacggacgattagagatcaccgcatcggcccacggtttagccgtgttaaaaccttcgttgatggcgctatcacggatcaccacctgaccgttggtattggcatcaacatccaggctgcggcccagttgcgccacaccatcaccgaaagcattgaaacggctgtttacggcgaggaaaccgtagtaaatgttggacagcgtagccggtgcaaacacatacgcttcttgctgagtacgactgttcaccacgcggaattcggtgttatcgaacaccactgcgccgcgaccagaaacgatatccacatccccttcaatgtagctgttggtcaccagcgtacgcggctgacgattcgtttccagacggttctgcacaccgctgttggtgacaaagaaggtgttctgacgaccgagaatgttaacgttgttaatctgtacctggtcaccatcagtacgcagtgccaccgccggatggttacctgcatctacgctatcgcccagcgtgttttcgatggtcagattttgcagttgcaggccattgttttgactccagaagaccgcagagcagagaacaccgatactgtcgctgcgtttgctctggcagctatcgtacatataccacgctggtttacctggcatatatttgccgcgcgggttgacgtcgtgacgccagtcggcagggctcatgccaccattaagggaaagcccaatcttcacatcaatcggtttttcacctgtaccgtacagagtaattccacccggagcggcagggacatataccgttccctgatactcaccaggcatcacggcaatatactggcgcttgttggtacgcttgataattgccgcatctaccgccgcctgaatcgtggtatgcgttacaccttgagtgcccgccgggccgacaacaaagtcaggttgcgcaggcagggtaatcggggaaggattccacgctgcagcacctggtgtcagggatgcaaaatagtgttgagcatcgaaattctgcgcttcttttgcgctcagaatcgggcgagaagaggtaccaggcgcggtttgatcagaaggacgttgatcgggcggggtactgctacaggcggtcagcgtcacgccaaaagccaatgccagcgccagacgggaaacactaaatgtgttcacaggttgctccgggctatgaaatagaaaaatgaatccgttgaagcctgcttttttatactaacttgagcgaaacgggaaggtaaaaagacaaaaagttgtttttaatacctttaagtgataccagatggcattgcgccatctggcagagtgattaactaaacatcgcagtaatgctggcgcttgccagagagtggaaatgaacgttaaacccgaccatcgcgccgctggcaccttcatcgacatcaatacgttctatatccagcgcgtgaacggtaaaaatgtagcgatgagtttcgcctttcggcggtgctgcgccatcgtacccggttttaccaaagtcggtacgcgtctgcaaaacgccgtctggcattgctaccagaccagagccaaacccttgcggtaatacgcgggtatcagcgggtaagttaacaactacccagtgccaccagccggagccggttggcgcatccgggtcgtagcaggtgacaacaaaacttttcgttcccgcaggaacatcatcccacgccagatgcggactaatattatcgccatcgtaacccatgccgttaaagacatgacgatgcggcaatttatcgccatcgcgcagatcgttactgatgagtttcatgaaccctcctttcttgtttgcagaaagtgtagccagaaaccctcacgcggacttctcgttattggcaaaaaaatgtttcatcctgtaccgcgcggttaaccgctgcggtcagacgctgcaactgttgcgggagaataatatagggcggcatcaggtaaatcagtttgccaaaaggccggatccagacaccctgttcgacaaagaatttttgcagcgccgccatattcaccggatgagtggtttcgaccacgccaatggcccccagtacgcgcacatcggcaaccatttcggcatcacgggcgggggcaagttgctcgcgcagctgtacttcaatatccgccacctgttgctgccagtcgccagattcgagaatcgccaggctggcgtttgctgccgcgcaggccagcggattgcccataaaagttggcccatgcataaagcaaccggcttcaccgttactgatggtttctgcaacctcgcgcgtggtgagtgtggcggaaagggtcattgtgccgccggttaaggctttaccgaggcacaaaatgtccggcgcgatttctgcatgttcacaggcaaacagtttcccggtacgaccaaatccagtggcgatctcgtcggcaatcagcaagataccttcgcgatcgcatattttgcggattcgttttaaccattccggatggtacatgcgcatcccgcctgcgccctggacaatcggctcaatgatcaccgccgcgatttcatgacgatgcgccgccatcaggcgggcaaagcccaccatatcgcgctcatcccattcgccatccatgcggctttgcggggcgggagcaaacaggttttctggcaggtagcctttccacagactgtgcatactgttatccggatcgcacacgctcatcgcgccaaaggtatcgccatgataaccattgcggaaggtcagaaaacgctggcgcgcttcgcctttggcttgccagtactgcaacgccattttcatcgccacttccaccgctacggaaccggagtccgcgagaaaaacgcactccagcggttgcggcgtcatcgccaccagtttgcggcacagctcaatggctggcgcatgggtgataccgccaaacatcacatggctcatggcatcaatttggctcttcatcgccgcattaagctgcgggtgattgtagccgtggatcgccgcccaccaggagctcataccgtcaaccaggcgtctgccgtcagacaaaatcagctcgcaaccttcggcgctcaccaccggataaaccggcagaggggaggtcatggatgtgtatgggtgccagatatggcgttggtcaaaggcaagatcgtccgttgtcataatcgacttgtaaaccaaattgaaaagatttaggtttacaagtctacaccgaattaacaacaaaaaacacgttttggagaagccccatggctcaccgcccacgctggacattgagccaagtcacagaattatttgaaaaaccgttgctggatctgctgtttgaagcgcagcaggtgcatcgccagcatttcgatcctcgtcaggtgcaggtcagcacgttgctgagcattaagaccggagcttgtccggaagattgcaaatactgcccgcaaagcagccgctacaaaaccgggctggaagccgagcggttgatggaagttgaacaggtgctggagagcgcgcgcaaagcgaaagcggcaggaagcacgcgcttctgtatgggcgcggcgtggaagaatccccacgaacgcgatatgccgtacctggaacaaatggtgcagggggtaaaagcgatggggctggaggcgtgtatgacgctgggcacgttgagtgaatctcaggcgcagcgcctcgcgaacgccgggctggattactacaaccacaacctggacaccagcccggagttttacggcaatatcatcaccacacgcacttatcaggaacgcctcgatacgctggaaaaagtgcgcgatgccgggatcaaagtctgttctggcggcattgtgggcttaggcgaaacggtaaaagatcgcgccggattattgctgcaactggcaaacctgccgacgccgccggaaagcgtgccaatcaacatgctggtgaaggtgaaaggcacgccgcttgccgataacgatgatgtcgatgcctttgattttattcgcaccattgcggtcgcgcggatcatgatgccaacctcttacgtgcgcctttctgccggacgcgagcagatgaacgaacagactcaggcgatgtgctttatggcaggcgcaaacagcattttctacggttgcaaactgctggccacgccgaatccggaagaagataaagacctgcaactgttccgcaaactggggctaaatccgcagcaaactgccgtgctggcaggggataacgaacaacagcaacgtcttgaacaggcgctgatgaccccggacaccgacgaatattacaacgcggcagcattatgagctggcaggagaaaatcaacgcggcgctcgatgcgcggcgtgctgccgatgccctgcgtcgccgttatccggtggcgcaaggagccggacgctggctggtggcggatgatcgccagtatctgaacttttccagtaacgattatttaggtttaagccatcatccgcaaattatccgtgcctggcagcagggggcggagcaatttggcatcggtagcggcggctccggtcacgtcagcggttatagcgtggtgcatcaggcactggaagaagagctggccgagtggcttggctatagccgggcactgctgtttatctctggtttcgccgctaatcaggcagttattgccgcgatgatggcgaaagaggaccgtattgctgccgaccggcttagccatgccagtttgctggaagctgccagtttaagcccgagccagcttcgccgttttgctcataacgatgtcactcatttggcgcgattgcttgcttccccctgtccggggcagcaaatggtggtgacagaaggcgtgttcagcatggacggcgatagtgcgccactggcggaaatccagcaggtaacgcaacagcacaatggctggttgatggtcgatgatgcccacggcacgggcgttatcggggagcaggggcgcggcagctgctggctgcaaaaggtaaaaccagaattgctggtagtgacttttggcaaaggatttggcgtcagcggggcagcggtgctttgctccagtacggtggcggattatctgctgcaattcgcccgccaccttatctacagcaccagtatgccgcccgctcaggcgcaggcattacgtgcgagcctggcggtcattcgcagtgatgagggtgatgcacggcgcgaaaaactggcggcactcattacgcgttttcgtgccggagtacaggatttgccgtttacgcttgctgatagttgcagcgccatccagccattgattgtcggtgataacagccgtgcgttacaactggcagaaaaactgcgtcagcaaggctgctgggtcacggcgattcgcccgccaaccgtacccgctggtactgcgcgactgcgcttaacgctaaccgctgcgcatgaaatgcaggatatcgaccgtctgctggaggtgctgcatggcaacggttaataaacaagccattgcagcggcatttggtcgggcagccgcacactatgagcaacatgcagatctacagcgccagagtgctgacgccttactggcaatgcttccacagcgtaaatacacccacgtactggacgcgggttgtggacctggctggatgagccgccactggcgggaacgtcacgcgcaggtgacggccttagatctcagcccgccaatgcttgttcaggcacgccagaaggatgccgcagaccattatctggcgggagatatcgaatccctgccgttagcgactgcgacgttcgatcttgcatggagcaatctcgcagtgcagtggtgcggtaatttatccacggcactccgcgagctgtatcgggtggtgcgccccaaaggcgtggtcgcgtttaccacgctggtgcagggaagcttacccgaactgcatcaggcgtggcaggcggtggacgagcgtccgcatgctaatcgctttttaccgccagatgaaatcgaacagagcctgaacggcgtgcattatcaacatcatattcagcccatcacgctgtggtttgatgatgcgctcagtgccatgcgtagcctgaaaggcatcggtgccacgcatcttcatgaagggcgcgacccgcgaatattaacgcgtagccagttgcagcgattgcaactggcctggccgcaacagcaggggcgatatcctctgacgtatcatctttttttgggagtgattgctcgtgagtaaacgttattttgtcaccggaacggataccgaagtggggaaaactgtcgccagttgtgcacttttacaagccgcaaaggcagcaggctaccggacggcaggttataaaccggtcgcctctggcagcgaaaagaccccggaaggtttacgcaatagcgacgcgctggcgttacagcgcaacagcagcctgcagctggattacgcaacagtaaatccttacaccttcgcagaacccactagcccgcacatcatcagcgcgcaagagggcagaccgatagaaagtttggtaatgagcgccggattacgcgcgcttgaacaacaggctgactgggtgttagtggaaggtgctggcggctggtttacgccgctttctgacactttcacttttgcagattgggtaacacaggaacaactgccggtgatactggtagttggtgtgaaactcggctgtattaatcacgcgatgttgactgcacaggtaatacaacacgccggactgactctggcgggttgggtggcgaacgatgttacgcctccgggaaaacgtcacgctgaatatatgaccacgctcacccgcatgattcccgcgccgctgctgggagagatcccctggcttgcagaaaatccagaaaatgcggcaaccggaaagtacataaaccttgccttgttgtaaccattctgtatttggttaaattgcgagcgagatcgcgtcttcgattgactgcaatttaaccaattaaattctaaaataatcacgaaaaaaattttacttccgcctcatgcggcgaatgtgggaattgcccaggcggcgggggataggggctggagacagttatccactattcctgtggataaccatgtgtattagagttagaaaacacgaggcaagcgagagaatacgcggcttgcacgcgaattggcgttaaagacggctcaaagaaatatcttttattttttaactggttagataaatgcaatggcagtcactgaacaggcatctcttgccataaaactgtcatcactcatcttgacaaatgttaaaaaagccgttgctttggggataacccggtaaggccggagttttatctcgccacagagtaaattttgctcatgattgacagcggagtttacgctgtatcagaaatattatggtgatgaactgtttttttatccagtataatttgttggcataattaagtacgacgagtaaaattacatacctgcccgcccaactccttcaggtagcgactcatgagtaaaccgttcaaactgaattccgcttttaaaccttctggcgatcagccagaggcgattcgacgtctcgaagaggggctggaagatggcctggcgcaccagacgttacttggcgtgactggcagtgggaaaaccttcaccattgccaatgtcattgctgaccttcagcgcccaaccatggtacttgcgcccaacaaaacgctggcggcccagctgtatggcgaaatgaaagagttcttcccggaaaacgcggtggaatatttcgtttcctactacgactactatcagccggaagcctatgtaccgagttccgacactttcattgagaaagatgccagcgttaacgaacatattgagcagatgcgtttgtccgccaccaaagcgatgctggagcggcgtgatgtggttgtggtggcgtctgtttccgcgatttatggtctgggcgatcctgatttatatctcaagatgatgctccatctcacggtcggtatgattatcgatcagcgcgcgattctgcgccgactggcggagctgcaatacgctcgtaatgatcaagcattccagcgtggtactttccgcgttcgtggcgaggtgatagatatcttcccggcagaaagcgatgacattgcacttcgcgtggaactgtttgacgaggaagtggaacgattgagcttatttgacccgctgaccgggcagattgtttccactattccacgttttaccatctacccgaaaacgcactacgtcacaccgcgcgagcgcatcgtacaggcgatggaggagatcaaagaagagctggccgccagacgcaaagtgctgttggaaaacaacaaactgctggaagagcagcggctgacccagcgtacccagtttgatctggagatgatgaacgagctgggctactgtagcgggattgaaaactacagccgcttcctctccggtcgtggaccgggtgagccaccgccgacgctgtttgattacctgcctgccgatgggctgctggtcgtcgatgaatctcacgtcaccattccacaaattggcggcatgtatcgcggtgaccgggcgcgtaaagagacactggtggagtacggcttccgcctgccaagtgcgctggataaccgtccgcttaagtttgaagagttcgaagcattagcgccgcaaaccatctatgttagcgcgacgccgggtaattacgagctggaaaaatccggcggcgatgtggtggatcaggtggtgcgtccaaccggattgcttgacccgattatcgaagtgcggccggtggcgacacaggttgatgatcttcttagcgagattcgtcagcgagcggcaattaacgaacgcgtactggtcaccacactgaccaagcggatggcggaagatcttaccgaatatctcgaagaacatggcgagcgcgtgcgttatcttcacagtgatatcgacaccgtcgaacgtatggagattatccgcgacttgcgtctgggtgagttcgacgtgctggtagggatcaacttactgcgcgaaggtctggatatgccggaagtgagcctggtggcgatcctcgacgctgacaaagaaggcttcctgcgttccgaacgtagcttgatccagaccattggtcgtgcggcacgtaacgttaacggtaaagcgattctctacggcgataagatcaccccaagtatggcgaaagcgattggcgaaaccgaacgtcgccgtgagaaacagcagaagtacaacgaggaacacggaattacgccgcaaggcttgaacaagaaagtggtcgatatcctggcgctggggcagaacattgccaaaaccaaagcgaagggcagaggaaaaagccgcccgattgttgagccggataatgtgccgatggatatgagccctaaagcgttgcagcagaaaatccatgagctggaagggttgatgatgcaacacgcgcagaatctggagttcgaagaagcggcgcaaattcgtgaccagttgcatcagctgcgtgagctgtttatcgcggcaagctaacaggatagcgaagaagactgatgacaaacggaaaacagcctgatgcgctacgcttatcaggcctacattttctccgcaatatattgaatttgcgcggtttgtaggccggataaggcgttcacgccgcatccggcataaacaacgcgcactttgtcttcaataggaagccggaattttccttcggatttccgttaacctaaagcctgtaacgccttttccagcgcgttatgtaacaactggcggtcatgacgatacggaatatcgctggcctccagtacctcctggatcacaatccgctctttcaccgcgctgacatccacttttggcccgacgatgaccgcatcaatgacctttttaccaacatactgctccataattgccagcttgctttccagcttcaaattagccgcaggtaaactcaactcacgccccagattgccgatataaaccatcggcgctggcgtgcggcgtaatgcctgggcgatttccttcagcagcagaattggcatcaggctggtataaaaactgccaggcccaataatgatgagatccgcttcattgatagcgtgaaccgcctcacgcgttgcgggtacattaggcgttaacaataactcttgaatcggcgtagttaactggtcgatattgacctcgccgtaaacttcatgcccctgatcgtcaatcgccatcagatcaacaggatgctcactcattggaatcaaatgcgtatccactttcagcagattacgaattaaattgatggcttccagaggccgcacgctaaggtgatccagcgcctttaacatcaagtttccgagattatgaccggaaagttcgccattgccaccaaaacggtattcaaacatcgcggaggcgacgctcggttccgttatcagctggttgaggcagttgcgcatatcgccccaggcaatgccgccttcactacggcgaatacgccccgtgctgccaccattatcggtggtggtgacgatacccgttaaacgagaacccaaagagctaagactactgagaacgcgtcccagtccatgccctccgccgagagcaacgacacgatcaagatcagccagcgtacgattgcgcatatagtttcctggagtcagattatccgcgctacagtagcgcaaattgcggggaaacagcaattaacctgccaatattgaggatacaaactattttcttctacctctaaaggacgatgcacgctatgcctccctgatgatgtatatcaaagtaaaaccgccattttcccttattctgtagcgaaatagcacgatcatgacgctatatacatgattacatagcgaaagtgtggatggtaaaaatctcatttacacgctagtatcggcataaccactaaacactctagcctctgcacctgggtcaactgatacggtgctttggccgtgacaatgctcgtaaagattgccaccagggcgaaggaagaaatgacttcgcctcccgtatctggaaaggtgtacatggctagtcaactgactgatgcatttgcgcgtaagttttactacttgcgcctgagcattaccgatgtgtgtaactttcgttgcacctactgcctgccggatggctacaaaccgagcggcgtcaccaataaaggctttcttaccgtcgatgaaattcgccgggttacgcgcgccttcgccagactgggcaccgaaaaagtgcgcctgacaggaggagagccgtctttacgccgcgactttaccgatatcatcgccgctgtgcgggaaaacgacgctatccgccagattgcggtcacaaccaatggttaccgtctggaacgcgatgtggcgagctggcgcgatgcgggacttactggcattaacgtcagtgtcgacagtctggacgcccgccagtttcacgctattaccgggcaggataaattcaaccaggtcatggcagggattgatgctgcatttgaggccggttttgagaaggtcaaagtcaataccgtgctgatgcgtgatgttaatcatcaccagctcgacacctttctgaactggatccagcatcgccctatccagctgcgtttcatcgaactgatggaaacgggcgagggcagcgagctcttccgtaagcatcacatctctggtcaggttctgcgtgacgagctactgcgtcgcggctggatccaccaattacgtcaacgcagcgacggtcccgcgcaagtcttttgccatccagattacgccggagagattggccttatcatgccgtatgaaaaagacttctgcgccacttgcaaccgcctgcgcgtttcctccattggtaaactccatctctgcctgtttggtgaaggcggcgttaacctgcgcgatctgctggaagacgatacccagcaacaggcgctggaagcgcgtattagtgcggcgctgcgggagaagaaacagacccatttcctgcatcaaaacaacaccggtattacgcaaaacttaagctacattggcggctaaaacgtcaaaaggagagatcagatgagtcaggtaagcactgaatttatcccgacccgtattgctattcttacggtttctaatcgtcgcggtgaagaagacgatacctccggtcactatctgcgcgatagcgcgcaagaagcgggccatcacgttgtcgataaagccattgtgaaagaaaaccgctacgctattcgcgctcaggtatctgcgtggatcgccagcgacgatgtacaagtggtattgattacgggtggtactggcctgacggaaggtgatcaggctcccgaagcattgctgccgttgttcgaccgtgaagttgaaggttttggtgaagtgttccggatgttgagctttgaagagattggcacttccacgttgcaatctcgtgcggtagcgggcgtcgccaacaaaacgctgattttcgccatgccgggtagcaccaaagcgtgccgtaccgcatgggaaaatatcatcgcgccgcagctggatgcccgtacgcgtccgtgtaatttccatccacatttgaagaaataagtatgagccaactgacccatatcaacgccgctggcgaagcgcacatggtggatgtctccgccaaagcggaaaccgtgcgtgaagcgcgggcggaagcctttgtcaccatgcgcagcgagacgctggcgatgattattgatggtcgccaccacaaaggcgacgtatttgccactgcgcgtattgccggtattcaggcggcaaaacgcacctgggatctgatcccgctctgtcatccgctgatgctcagcaaagttgaagtcaatttacaggccgagccggagcacaatcgggtgcgtatagaaaccttatgccgcctgaccgggaaaaccggtgtcgaaatggaagcattaaccgcggcctccgtggcggcgctgaccatttatgacatgtgcaaagcggtgcaaaaagatatggtgattggtccggtacgtttgctggcgaagagcggcggcaagagcggtgactttaaggtggaagcggatgattaaagttctttttttcgcccaggtgcgcgagttggtgggaacagatgcaaccgaagtggctgcggatttcccaactgttgaagcgttacgccagcacatggctgcgcagagcgatcgctgggcgctggcgctggaagatggcaaattactggctgccgtcaaccagacgctggtgagttttgaccatccgctgactgacggcgacgaagtagctttcttcccgccggtaaccggaggttaagatggcagaaaccaaaattgttgttggtccgcagccgttcagcgtaggagaagagtacccgtggctggcggagcgtgacgaagacggtgcggtagtcacctttactggtaaggtgcgcaaccataacctgggcgacagcgtcaacgcattaaccctcgaacactatccggggatgactgaaaaagcactggcagaaattgttgatgaagcgcgtaaccgctggccgctggggcgcgtcactgtgattcaccgcatcggggaattatggccgggcgatgaaatcgtttttgtcggtgtcaccagtgcgcatcgcagcagtgcgtttgaagccgggcagtttattatggattatctcaaaacccgcgcaccgttctggaagcgcgaagccacgccggaaggcgaccgctgggttgaagctcgggagagcgatcagcaggcggcaaaacgctggtaattttttgttagccggataaggcaccgctgcgtccggcaatttcaccgctcagtacatacgtttacgctgcgtcgatgcacagcctcatcattttgcagtatccttaagatattccttatatcttcaggagatcgtcatggacagattcccacgttctgatagtatcgtacaaccccgggctggcttgcaaacttatatggctcaagtctatggctggatgaccgttggcttgttgctgaccgcatttgttgcctggtatgcggctaattccgcggccgtgatggagctgttgttcactaaccgtgtctttttaatcggtctgatcatcgcgcaattagcattggttattgtgttaagtgcgatgattcaaaagctgagcgcaggtgtaacgacgatgctctttatgctttatagcgcgctgacgggtcttacgctttccagtatattcattgtctataccgctgcttctatcgccagtactttcgtcgttactgccgggatgttcggcgcaatgagcctgtacggttacaccacgaagcgcgatttaagtggctttggcaatatgctgtttatggcgttaatcggcattgtgctggcaagcctggtcaacttctggttgaaaagcgaagcattgatgtgggcagttacctacatcggcgtgattgtctttgtcggattgacggcgtatgacacgcagaaactgaaaaatatgggtgagcagattgatacccgcgacacgagcaacctgcgcaaatattccattcttggcgcgttaaccttgtatctggacttcatcaacctgttcctgatgttgttgcggatcttcggcaaccgccgttaattctttttcaccatcactatcccggccatgtgtcgggatttttttcttactaaaaacgacacttaacaagtaccaggtataaaatatgccttatggacgagcggaagcgttttctgtatccataaatgcaaaagtattttgtatgcgtggttttaaatttattgatggtgaatattaatattttttctaaggataactaaaagaatggaaagttacagccaaaacagcaataaattagattttcagcacgaggccaggatattaaacggtatatggctcattaccgctttaggtttggtggcaaccgcaggactagcctggggagctaagtatatcgaaattacggcaaccaaatatgatagtccaccaatgtatgtcgccatagggttattattactttgtatgtatggcttaagtaaggatatcaacaagataaatgccgccatcgcgggcgtaatatatctgtttttactctctttggtggcgattgtcgttgcaagtttagttcctgtatatgccattatcatcgtgttcagcactgcgggcgcgatgtttttaatcagtatgctggccggtttattatttaatgttgatcctggttctcaccgttttatcattatgatgacgttgacagggttggccctggtaatcatcgtgaatgcggcattaatgagtgaacggcccatttggataataagttgcttaatgattgtgttatggagtggcattatcagccatggacgaaataagctccttgaattggcggggaaatgccatagtgaagagttgtggagtccggttcgttgcgcttttacaggtgcattaacactctattactattttatcggcttctttgggatacttgccgcgatagctataacgcttgtctggcaaaggcatacgcgtttttttcattaaccgtaaatgcacatactaaagaacttaactaaacttcacatcgccgcttcatttttcgcccgtagcttcttcgcctggctttccagcaacaggtaacagatcagcgccagcagcagtgggataaagtaatacagcacacggtaagcgagtagggcggcgataattgtacctttggaggtatgctccccagccagtagtgcgataaacaccgcttccagcacaccgatccccgccggaatatgcacgatgacgccagcaatactactaaccagtaacacgcccagtacaaagaaatagttcacgctttgaccaagtaacagccagataatcgcccccattaccatccagttaacgctggaaatcagcatctgagcgagggcgaatttccaactaggcagcaccagcttttgccctttgatggtcatatggcggtgcttcgcgaaagcgcaaaaccacaaataaaccgcgataatcatcagtaagccaatgccgagaatacgcagcgtagtttgatcgacataccagtgatccggcaactccaccacgcctgcggtaaagataatccctgccagtaaaatgtagcccagccagttggtggtaatactgaggctgaaaatccgcgtaatagtgctaccgggcaaccccagacgagagtacaaacgatagcgcataccaatgccgccgacccaggtactgagcgtcaggttgaaggcgtagcagataaagctcaccagcatcacctggcgcttcgccagtttgtgaccgcagtaaaagcgggcgagcaggtcatagcagccgtaaatcagatagctgacgaccaccagcccgaccgcactaagcagcgcaacgcgattgtagtcgcggatgaccttccagacctcttcccagtccacttttttggcgtagaccaccagcaacacaatcaccgcgataaaaaacagccaggtgaggatcttctttgctaagcgccagcgcgggtgacttttactcatcagggttttacccccgtgttttcagtttctacccgatcctgcgtttccattgtcggttgtgcgggcggatcaacctgcgccagacgtggcgtgtgtgccggaagccagccaaccagcgccgggaagtggcgtaaaaagtggaacgccagcacgcttttggtcaggttccaccaggtgcgtttgggcagcatggtttcatccacctgctgacaatctgcggcaataatgccgttcagattatcgcgcagcgtctggttaaaatgacgatcgtggatgatgacatttgcttcgagattcagactcaaactgagcggatcgagattactggaccctactgtcgcccagtgatcgtccatcaatgccactttgccgtggagcgggcggcggcggtactcaaaaacctgaacgccgcctttaaccagatagttatacagcaagcgcgcaccgactctgacaatcggcatatccggttcgccctgaatgatcagtttgatccgcaccccgcgccgtgccgctttacgcaaggcgtgtaaaaatcgatagccggggaagaagtaggcgttggcgataatcacttcccgccgcgcctgagtgagcattttcaaataatggcgttcaatatcatcgcgatgttcttcgttatcgcgccagaccagcaatacctgcgcttctcccggctggcggttctcttccgctttgtgatgacgtcgccaccagcgtcgtgccgcgctctgtccaggcaggttttccagctcaaactggagaatatcttcgacaatcggcccttcaaggcgtaccgcgtaatcctgtttagcctctggaccgtagctggacatatgctcggcggagtaattcagcccgccaataaaggctatacgcgcgtcgatcaccacaattttgcgatgcatccggcgaaacacattggtgcgcataccaaaaaggcgagggcggggatcgtagtagcggaacactacgccagctgccgtcagttcattgacaaactcatcgctgagatccgggctaccgtagccatccagcaagacttccgctttaaccccgcgttgcgctgctgccagtagtgccgcatgcagttgtttgccgacgtcatcctcaaaccagataaacgtttcaagaatgatgcgttcttgtgcctcgccaatcgccttaaacaccgcgggataatattgctcgccgttttccagcaactggatcttattgccttcgcgccagctacatttcataaatgaatctccgcacttaaaggggcatgatcagaaaggtgtcgccatgtccgcagcggcaacgcggttggcgcgctggcgctggcatttttgacgtagatcctgtccagtcgtagtagaggaaattgcaccggaaacgtgcgcgccgggcgtccgtgggcgcgggtaaaaatctcatccagtccggcctgcacttttaacggatgattagctttttgccgccagtcattgaaatcacccgccaccaataccggttcgccgtccggtagctcattcacccattcggcgagcatcgcaagctgcgcctgacggtgcgcctcacgcaggcccagatgtacgcacatcacatgaatcgcttttccggtcatcggcggcacaatgcggcagtagagcacgccgcgcttttccgcaccatcgacgctaacatcgcgattctcataatgttcaatgggataacggctcagtacggcgttgccgtgatgcccttccgggtatacggcattgcgaccgtaggcaaaatcgctccacatagtgtcggcgagaaactcgtagtggctggtatcgggccagttttccacatgcagcggatgaacttcgtgcgcgcccatcacttcctgcaggcaaacaatatcggcgctgacggtacgcacggcgtcgcgaagttccggcaaaatgaagcgtcggttaaacgcggtaaagcctttgtgaatattgatggtgagcaccttgaagctaaattgttgtgtttgatcgggcataattttcctgtctttgcctcttatctcattgaaatagtgtagtcggcgtcacaaaaaggtgcggtcttacggaattttccgtaaagttcggtactctgagtaagtagagataaattcttcaggagagaagccatgaagtggcaacaacgtgttcgtgtcgcaacgggtctaagttgctggcagattatgttgcatttactggtagtggcgctgctggtggtgggctggatgagtaagactctggttcacgtcggcgtgggattatgcgcactgtattgtgtcacggtagtgatgatgctggtgtttcagcgccaccccgagcaacgctggcgtgaggtggcagacgtgctggaagagctgaccacgacctggtattttggcgcagcgctgattgtgctgtggctgttgtcccgcgttctggaaaacaactttttgctggcaattgcagggctggcaatccttgccggcccggcggtagtgtctttgctggcgaaagataagaagttacatcaccttacgtctaaacatcgcgtacgccgctgattacatcaccttacgtctaaacatcgcgtacgccgcactccctgtcgtggccgttatcaccagtagcggccacaaactattccacacaatatccagactcgcatccttcaaataaatctgcttggtaatgtccgtaaagtggcgaatagggttaatccacgtcaggttttgcagccataccggcatgttttccaccggagaaacgtaaccggaaaggagaatggcgggcatcataaagacaaacacgccgataaacgcctgctgttgtgtactacagagactactaatcaacagaccgaatcccaccaggcttaaaccataaatcaccatcgtaaagtagaacagcgccaggcttccggcgaaggggatttgatacgcccagataccaatcgccagcacaatggtggcctggaaggtggcgacaattaacgccggtacggctttgccgatgaagatctgccaggtggtgagcgggctaaccagtagctgatcgagcgtaccttgttcacgttcgcgggcgacggaaagactagtgacgatcattacgccgatagtggtgatcatggcgatcagactcggcaccacaaaccatttgtagtcgagattcgggttataccagttgcgtaccaccagctcgctgttgttaggtttcggttttccttccagcagctcctgctgataatttttgacgatctgttgcaggtagttggcggcaatttgcgcactgttggagttacgcccgtcgaggatcaactgcaaaggcgcggtctggaaggtatccagtttgcggctgaagtcagccgggaaacgcaccagtagtaacgccttttgtgtgtcgatggttgggcggatctcctgtgggcttttcagcagcagcacatgagtaaaggcgctggcgcgggcaaaacgttgggtcagctccacgctatgctcgccgttatcttcatcgtagatggcgatggtggcgttagtcacttccagcgtggcggcgaacgggaacaggatcacctgaattagcacgggtaaaatcagaatcgcgcgggtttgcggttcgcgcagcaagctctgcaactctttgcggattaacgtccataagcgatgaaacatgctcttctccttaatccagccgacgtttggttttcagccacgtcaggccgataaacatcaccgcgctagcgatcaaaaacagcacgtttaccaccagcaccactggaatattcccggcgaggaacaggctttgcagggtgctgacgaaataacgagcgggaataatgtacgtcaccgcgcggatcaccgcgggcatactgtcgatctgaaaaataaagccggaaagcataatgctcggcagaaaagcggcgttcagggcgacctgagcggcattgaactggttgcgggtaatcgtggaaatcagcagccccatccccagggtactgagtaaaaacaggctggagataaaaaacagaatcagcaggctcccgcgatacggcacgccgagaataaacacactcaccagcatacacagcaacatcgccagcatcccgagaaagtaataagggatcagcttacacagcagcagttccgtgcgggtaatctccgtagagagcagagcctccatggtgccgcgttcccattctcgcgccaccaccaggctggtgagaatcgcgccgatgaccgtcatgataatggtcaccgcaccggggataatgaagtgctggctaatcgccgccgggttaaaccagtagcgggtttgtacatcaataagcggttcaaaagtctgcccgttgtcctccgctcgctgcatttgccagatctgccagatcccttcgacatacccctgtacaaagttagcggtattcggctcactgccgtcggtgatcacctgaatcggtgcggtggcgttggcgcgctccatctgttccgcaaaatccaccggaataaccaccagaccgcgaattttccccgcctgcattttggcgatcagttcctgacggttatcgctgatggtggcgtcgatgtaggggctaccggtcatggtgtgggtgaaatccagcgccgcttcgctacgctgttccagtaaaatcccgacccgcagcttgctggagtcgaggttaatgccgtaaccaaaaataaacagcagtagcagcgggatcactaccgcaatcagccagctactcggatcgcgaacgatctgccgcgtctctttaacgcacagcgcccgtacgcgacgccaggacaggatcgggttactcattgctatgctccttatcccagtcgtggatcaactgaataaaggcttgctccatggtgggatcgggttgctcatcgttagcgctctgtgctttcaaatcgtccggcgtgccgctggcgattaatttcccgcggtacaccaggccgatgcggtcgcaatattccgcttcatccataaagtgggtggtgaccatcaccgtgacgcctttctctaccatgctgttgatgtgcagccaaaattcacggcgggtgagggggtcaacgccggaagtcggttcgtcgagaaacagaatgtccggttcatgcatcaggctacaggccagcgccagccgctgtttaaaacctaatggcagttcatcggtggcgtgggaggcgatacttttcaggccgaacgcctcgctcatgcgggagattttttcgttctgcgcccgaccgcgtaagccatacacaccagagaaaaagcgtaaattctgttcgaccgtcaggttaccgtagaggctaaatttttgcgccatatagccgagatgctggcgcgctttaccggaactctctttcagatccatccccagcaccagcgcctggccggaagtcggcaccagcaaaccgcacatcatcttaaaggtggtgcttttacccgcgccgtttggccccagcaaaccaaaaatctccccacgtttaacggcaaagttgacgtgatcggtggcggcaaaatccccaaatttcttggtcagttctttcgcttcgatcaccgtctcgccgggtgtgccttctaccgtatgtaatattgcgcccagcgggctttcgctggttccggcaccgcccagcaaatcaataaacgcatcttcaaaacgcggcgtagtttcgttgatgttgatttccggcatcccgtcggcatggcgaatatcgtctggtgtggcctcttttttgaggatcagacgtacgcttttcccctgaatcatgccgtcgctgacctgcggcagtttcaaggcgcgttgcaacagtttgcggttgccctcgtgtggactggtcatcagaaagctgcgtccggccatggtttgtgtcagggcttttggttctccctgatacagcaactcgccttcgttcatcagtaacacgtcacggcactgctcggcttcgtcgagatagctggtactccagaggattaacatcccttcgcccgccagctcatgcaccatctgccacagttcgcgccgactgatagggtcaacgccgacgccgggttcatcgagcagcaacactttcggttcgcccaccagggtacaggccagaccgagtttttgtttcatcccaccggagagcttgcccgccaggcgtccggtaaacggcccaagagacgtaaactccagcaggcgagcaaaagtttgcttacgtgcctcgccggtgacgctgcgcaaatccgcgtacagattgaggttctccatcaccgtgagatcttcatacagaccaaatttctgcggcatataaccgagcacggcgtgcagcgcgccgtcgtttttgatcggatcaaagccaatcaccgtggcactgccgctgtcgggtttcagtaatcccgccaacatccgcatcagcgtggttttacctgcaccgtccggccccaccaaccccgtcacataaccggcgtgaatggtacaatcgagcggcgcgacggcgggcttgtccatgcccggaaagcgtttttccaggccgttcagcgtgataacggcatcattcatgtcctgcctcgtcaccgaattgtaccgtcactggcattccctggcgtaacgcatcatcggcgtcggtcaccacaatacgcaggcgatagacgaggtcggtacgcagatccggcgtttcgacggttttcggggtaaattcagcagtcgggctaacgaaaccaatctgcccgtgatacggcttgtccgggcgaccatcggtataaagcagcactttgcgccccggctgggcctggtcaagattacgttcatcaacataagcgcgcacccacaccggacgcgttagactaacggtaaacaccgtgccaccttcattgaggaccgtgcctggctccaccgcgcgcgttaacagcgtgccatcagacggggctatcaacgtactgtcctgtaaattcaactccgcctgcgccagttgcgcctgcgcctgttcgaggctggctttcgcctgagcgatgtcctgttcacggttaccggaacggtactgacgcaatttatcctgtgcacttttcagcgttgcctgcgcctggtcgcggctggagcgggcattttccaggtcatttgcgctaatagtgcggcttttccacaacccttgctggcggttatagaagttctgcgcatagtcataggcggcttgcgcctgtttcaccgctgcggcggcctgagcgatttcttcattgcgatacccggcaagcatcaggtcatactgcgcctgtgccacgctaacacccgctttcgcctgcatcagggcaatctcatacggcttgtgatccagttcgcccagcacctggcccgctttgatagcatcaccttcgtccaccgccaggctttcaacgcgccccccaacacggaaactaagatttaccgtacgaatatccacgttgccatacagcgtcaggccgttatcctggcggctttgataccaccagtagcctccggcaaccacggcggcaagtaccactaccgccaatccgatcacgacaggttttttcatcactacaaactcctttgcgataattacaaactcctttggcttaatccttgcaaaatcaggtcgatatgacaggtcaccgtctggttgatcagttcggtcttttcttcatcgaacgcggtccagccggtacgtaacagaattgtttctttgccaagacggaacgccagaatctcaccaatcaacgcatgggtatgaaggatcatgcgggtgtcattggcgtcgcagccggtccaggcggcaatcaggcgtgtcaggtggctgtgtagcggactaatcacctgttcgtgcaccaggtggtaggctgccgtgggagagagctgctcacgggagataaacttgctgaggttgacggtgtcatcctgggtgagcagcttaatcatgttcctgcaggcgcgaaggatcagttcacggatggcagcccgatcaggctgtggttgcgcgaacaagcgttcggcttcctcggcatgcggacggaactgctcgccaataaaatcggcaatccactgggcgcaggcgaggtacaaatcttctttgctaccgaagtagtaggtgatggcagcgatattctgcccggcctgggcggctatctcgcgagtggtggcgttcattccatattcaccaaactgcgccagtgcggcagcaatcagctgttttttcgcctgttcacccttgattgtcatggcaggattattcatcgcacagtccattcttaatcaaatgattgattaagattatgactccataggggagttgtccagtatggctaagaattttagcaacgccagtcacagggataatttatgcgctgcgtcacaaaaactgctacactccgctccctcatgacattgtggtttttgtcattttccttttcagtatctccctgaaaactacaccggtaacggtcggggcggttcggagtagttatgtctttcgattctttgggtttaagccctgatatcctgcgcgccgttgccgagcagggttaccgtgaacccacccctattcagcagcaggcgatccctgcggtgctggaaggccgcgacctgatggctagcgcccagaccggcaccggcaaaacagcgggctttacgctgccgctgttgcaacacctgatcactcgccagccgcacgccaaagggcgtcgtccggtacgtgcgctcattcttaccccgacccgtgaactggcggcgcagattggcgaaaacgtccgtgattacagcaaatacctgaacattcgtagcctggtggtgtttggtggtgtgagtattaacccgcagatgatgaaactgcgtggcggcgttgatgtgctggtggcaaccccgggacgtttgctggacctggaacatcagaatgcagtgaagctggatcaggttgaaatcctcgtcctcgatgaagctgaccgcatgctcgacatgggctttatccacgatatccgtcgcgtgttaacaaaactacctgcgaagcgccagaacctgttattctccgcgaccttctctgacgatattaaagccctggcggaaaaactgttgcacaacccgctggaaatcgaagtggcacgccgcaataccgcgtctgatcaggtgacccagcacgttcactttgtcgataagaaacgcaaacgcgaattgctgagccacatgattgggaaagggaactggcagcaggtgctggtgtttacccgtaccaaacacggcgctaaccatctggctgaacagctcaataaagatggcatccgtagtgcggcgatccacggcaataaaagccaaggtgcgcgtactcgtgcgctggctgattttaaaagcggcgatattcgtgtactggtggcaactgacatcgctgcgcgcggcctggatattgaagagctgccgcacgtcgtcaactatgaactgccaaacgtacctgaagattatgtccaccgtatcgggcgtaccggtcgtgcggctgctaccggtgaagcgttgagcctggtgtgtgttgatgaacacaaactgctgcgtgatatcgaaaaactgctgaaaaaagagatcccgcgcattgcgattccgggctatgagccggacccgagtatcaaagccgaaccgatccagaacggtcgccagcaacgtggcggcggcggtcgtgggcaaggtggtggtcgcggtcaacagcaaccacgccgtggggaaggtggcgcaaaatctgcaagcgcgaaacctgcagaaaaaccgtctcgccgcctcggcgatgccaaaccggcaggcgaacaacaacgtcgccgccgtccgcgtaaacctgccgctgcgcagtaatcttttatgccgggctatgcccggcatcaggctgatgaacaaacgcaaaactgcctgatgcgctacgcttatcaggcctacgtgaactctgcaatatattgaatttgcatgcttttgtaggccggataaggcgtttacgccgcatccggcatttcacaacaagcacttgtcagcaatttgagaacacgggaaaaaatttatctgttttaccgcccataagccaccgagacgttacttctctatagccaattgttcgcgcaactccattaaaaggtagcccagtcgattcttgcccttaccatgaccaccgtctccccagtaagcatcgttttccgtatgctcaaccagttttgcgggcgcggttgccagcaagagcgcacgcagttctgcatgctgttcgaatttagcgcgaagtgcttttcgcatcacctgttctttgacgctctcccagtttttacgcagaggcttagaacgatcgcgccccatgcgtgcggcgaccataggggaagaaacccgacggatctcttcgcggtatttttcatcaaggaatttttgtgcctgaaaatagtgttcactggtaggccaggttttcccgtcaaccttgatgggccaggcggcaaagttagaaaaatcaccgtagtcatcgctggtgctgtagaaatttatgatggtgtcttgcatgacgtgttggatcctttgtgctcgaacgggcattaaaccgcattatgttggtggttattgcgagccgctttccagaaacagaaaaaccattacccctgaaaaccgaaaaatgccacaatattggctgtttatacagtatttcaggttttctcatggcattaaccgccgcgcttaaagcgcaaattgccgcctggtataaggcgcttcaggaacagatccccgactttattccccgtgcgccgcagcggcagatgattgcggacgtcgccaaaacgctggccggagaagaagggcgacatctggcgattgaagcccccaccggcgttgggaaaacgctctcttatttgattcccggcatcgccattgcccgcgaagagcaaaaaacgctggtggtgagtaccgccaacgtggcattgcaggatcagatttacagcaaagatttaccgctgctgaaaaagatcattcccgatcttaaattcactgccgcttttgggcgtgggcgctacgtttgtccgcgtaatctgacggcgctcgccagtactgaacccacgcaacaggatctgctggcgtttcttgacgacgaactgacgccgaacaatcaggaagagcaaaaacgttgtgcgaagctgaagggcgatctcgatacttataaatgggatggtctgcgcgatcatactgatatcgctatagatgacgatctctggcgtcgtttaagtaccgacaaagccagctgcctcaaccgcaattgttactactatcgtgaatgcccgttttttgtcgctcgtcgggagattcaggaagcggaagtggtggtggcaaaccatgcgctggtgatggcggcgatggaaagcgaagcggtattgcctgacccgaaaaatttactgctggtgctggacgaaggccatcacctgccggatgtggcgcgggatgcgcttgagatgagcgccgaaatcaccgcgccgtggtatcggctacagctggacttgttcacgaaactggtcgctacctgcatggagcagtttcgcccgaagaccatcccaccgctggcgatccctgaacgtttgaatgcgcattgtgaagagttgtatgagcttatcgccagcttaaacaacattctcaatctctacatgcctgccgggcaggaggcagagcaccgttttgcgatgggcgaactgccagatgaagtgctggagatctgccagcggctggcaaaactcaccgagatgctgcgtggcctggcggagttatttcttaacgatttaagtgagaaaaccggcagccatgacattgtacgtctgcatcggttgattttgcagatgaaccgcgcgttggggatgttcgaggcgcaaagcaaactctggcggctggctagcctggcgcaatcttccggtgcaccggtgaccaaatgggcgacgcgggaagagcgcgaagggcagctacacctctggtttcactgcgtgggaatacgtgtcagcgatcagctggaaaggctgctgtggcgcagtattccgcacattattgtcacctccgcaaccttgcgtagcctgaacagttttagccgtttgcaggagatgagtggtctgaaagagaaagcgggcgaccgttttgtggcgctggattccccctttaaccactgcgaacagggcaaaattgttattccccggatgcgcgttgagccttccatcgacaacgaagagcagcatattgccgaaatggcggcctttttccgtaagcaggtggagagcaaaaaacatctcggtatgttggtactgtttgccagcggacgggcgatgcagcgctttctcgactatgtgacggatttacgtctgatgttgctggttcagggcgatcagccgcgttaccgtttagttgaactgcaccgcaaacgcgtcgccaacggtgagcgcagcgtgctggtgggcttacagagttttgccgaagggcttgatttgaaaggtgatctgctcagccaggtgcatatccacaaaatcgcttttccgcccatcgacagcccggtggtgatcaccgaaggggaatggctgaaaagcctcaaccgctatccgtttgaggtgcaaagcctgccgagcgccagctttaacctgattcagcaggttgggcgactgattcgaagccacggttgctggggcgaagtggttatctacgacaaacgcttgctgaccaaaaattatggcaagcgactactggatgcattaccggtatttccgatagagcaaccggaagtccctgaaggtatagttaaaaagaaagaaaaaacgaaatccccacgccgtcggcggcgttaatgatgtgagtcaggtaaggagtcgtaaatggactatcgcaaaatcattaaagagatcgggcgcgggaaaaaccacgcgcgcgatttagaccgggatactgcgcgcggtctgtatgctcatatgctcaatggtgaagtccctgaccttgagttgggcggcgtattgattgcgctgcgtatcaaaggagaaggggaagcagagatgctcggcttttacgaagccatgcaaaatcacaccatcaagctgacgccgccagcaggcaagccgatgccgattgtcatccccagttacaacggcgcgcgtaaacaggccaacctgacgccgttgttggcgattctcctgcacaaactcggttttcctgtggtggttcacggggttagcgaagatccaacccgcgtgctgactgaaaccatttttgaattgatgggtattacgccaacgttgcacggcgggcaggcgcaggcgaagctcgacgaacatcaaccggtgtttatgccagtcggcgcgttttgcccgccgctggaaaaacaactggcgatgcgctggcggatgggcgtgcgtaacagtgcacataccctggcgaaactggcgacgccatttgccgaaggtgaggcgctgcgtctttccagcgttagccatccggaatacattggacgcgtcgcgaagttctttagcgatatcggcgggcgggcgctactaatgcatggtactgaaggtgaagtgtatgctaatccgcagcgctgcccgcagatcaatctcattgaccgtgaagggatgcgggtgctgtatgaaaaacaggacactgctggtagcgagttactgccacaagcaaaagatccggaaaccacggcgcagtggattgagcgttgccttgctggcagcgaaccgattcccgaaagcctgaaaatccagatggcttgctgcctggtggctacgggtgaagcggcaactatcagcgacggcctggcgcgcgttaatcaggcattttaattcttttctcagccggatgagccatgtcatccggcttttaccccaccgcaatatgaaattcctgcatctttattgaccttcccacgcccggcgtgcagcataaaaatacaacaaacacataacataaacaggagttaaccatggaaagtggtcatcgctttgatgctcagacgctgcacagttttattcaggctgtatttcgtcagatgggtagcgaggaacaagaagcgaaattagttgccgatcatttaatcgcggcaaacctggcagggcatgatagtcatggtattggcatgatcccaagctatgtacgctcctggagtcaggggcacctgcaaattaaccatcatgccaaaaccgttaaagaggcgggggcggcggtcacgctcgatggcgatcgcgcatttggtcaggtcgcggcacatgaagcgatggcgctggggattgagaaagcgcatcagcacggtattgccgccgtggcgctacataacagccatcatatcggccgtatcggttactgggcggagcagtgtgcagcggcggggtttgtctctatccactttgttagcgtggtcggtattccaatggtcgcgccgttccacggtcgcgacagccgctttggcaccaatccgttctgtgtggttttccctcgtaaagataatttcccgctgttgcttgattacgccaccagcgccattgcatttggcaaaacccgcgtcgcctggcataaaggcgtccccgtgccgccaggttgcctgattgacgttaacggcgtgccgacgaccaatccggcggtaatgcaggagagcccgttgggtagcctgttgacctttgccgaacataaaggctacgcccttgcagcgatgtgtgaaattcttggcggggcgctttccggcggtaaaacgacgcatcaggaaacgttacaaaccagtcccgatgccattcttaactgcatgaccactatcatcatcaacccggaactcttcggcgcgccggattgtaacgcgcagaccgaagcctttgccgagtgggtgaaagccagcccgcatgatgatgataagccgattttgctaccgggcgagtgggaagtgaacacgcgtcgcgaacggcagaagcaggggattccactggatgcgggaagctggcaggccatttgtgatgcagcgcggcagattggtatgccggaagagacgttgcaggctttctgtcagcagttagccagctaaaaaaaaagcccgtccagtggcggacgggcaaacaagggtaacataggatcaatgagggttagagcatatgcgtctgtcggcaaacagacagggaaatacttgtgctggacgtagcgtaaacgcctgatccgtccaacggttcggattttgtaggcctgataagacgcggtagcgtcgcatcaggcatctgttgccggatgcggcgtaaacgccttatccgtcctacgaattacttataaattaccgcagtaccgcttaatttattgttgttggtggcggaagtgatgctgtatccactggcaccggctgccgcggctttctcagccagtttcgcttccagggcatcgagggtggatgcgccatcggcagaaaccacgccgattttattcatgttctgtgcctgggatgccgttaccggttccgccgcgaacacgccaaaactcagagtactaagagccatagcagcaacaacagtattgatagttttcataattaatctctcgcaggtgatttttgtataagtgacgttgtttcgtcgatgtgatgagtatcacgtttttttacgagagataaaatcgaagagaattgaccgccttgttcaaataaattgattgatatctaacctactgataaaccatttatttgttgtacttatgaacttgttttataccgcgtggcagtcacagcagcgttaaaggcacggaatgacacgcaaaatacaaattatactcgctatgcatctcgccagttgtagttaacgtaactggctgtctttgctacctctgcgattatatcctgtataagctggtttttgtaaatctttctcctgctgacaatgaatacataagcgcacgccaggaatggcttcccgacgggcctgcgggatgggggcaccgcactcttcacattcatccaggctttcgccgcgcggaatttcaccccgagcgcgggcaatcgcatcttcaattgtactgttgatctgttcgttgacggcgtcatcgttagcccaaccggatgccatatcgacctccccatatcaatacttgtacagttaagtgtagctaatccagggacgaactcgggcagttcaagcatcagatctcgctccattcccgcagcagattatgataaagattaagcaggctcaggatctcttcactttcgccgtagcggcttttcaggctctgaatattgttgtccagttcaaacagcatggcgcgctttttatcatcgcggatcatgctctggatccacataaaacttgccactcgtacgccgcgggttacgggtgtcacgcaatgcaggctgctggagggatacaacacgagatcgcctgccgggagttttacccgatgttgtccgaaggtgtcattaacgaccagttcgccgccgtcgtagctttgtggatcgcttaaaaacagcgtggcagaaaggtcagtacgcatccagccgttttgtggatggctgcgtactgcgccatccacatggaaaccataggtttcattgttctgatagcgattaaacagcggcgtggaaagggtacgcggcaaggccgcggcaaagaataaagcatgttggttaaccgcgttcagcacctcattttgcagggcggcgtataacgtgctgcgggtgtcgacctgttgattgttcttaacttgcgcaccttgtgcgccggtggtgacgcgtccatccacccattcggcttgttccagttgttcgcgaaaacgagcgacgtcctgtgggcttaacacgccgggaatgtggtacatcatacaatttctccaaaaagtggggcctgcgccccacatctgaatcagaaatgcatattggctgtgagcaagaaggttcttggctcgcccgggtgataacggtagccgctcttgttgatactggcgacgtaatcggtatcaaacaggttgtaaacgtttagctggaagtcgagattgcgattaactcgataccccagtttggcatcggcgacccagtaaccttcggtaaacgctggcgttcccaccgcgccgtcactacctttatgcatactgccgatatagcgtgcgcccgcgccaacagagatatcgtcggttgcctgatattggctccataaggtgaaggcgtgctccggggtatacggcaggctactggaaccatcctgggcaacatctttgccgtttttgatggttgctttttgctgggtatagccgccaatcacctgccacgcgggagtgatattcccggccacggatatctcatagccttcgacgcgtttcttaccgtattggctgtaagttccgtcatcattttgctcaacttcattttcgatatcagtgcggaacagcgcggcggtgagcaacagacgtttatccagaacctgccatttggtgccaatctcgctggtgttggctttttgcggtttaaaatcggtgcggttggcactgttaccgctgccagactgcgcaagggcgaagttgttgccgcccggaggctgctgggaaacggcatagttaatatagacattgccgttttccgtcaggtgatacagcgccccggctttccagttcatcagattgccgctcttggcggtgtcgacggtggtgaccggagaaccttttgccacaccagttgggcaggtgatggcaccgcgtccgctgccgccgcaggcggtggcactgtcatattcagtatgataattatccagacggatcccgccgttcagctcaaaatcacgggtgatttgcagcgtatcaaaggcgtaaattgcgaaggtatccgtctgaccattggcgtttgcgccgttgcgcgtcaggccgccgggatgaatgctgctgtcaggatgataaatatttaccgcgggtaacgtcaccggattaacgccgtagttagtctgcgtttcacgggtaaattccacgccggtactgacatcatgaccgatagaaccggtatagaacgtgctggtcaggttggtctggttggtgagaattttattactcacatctttggtattcgccgtgcgactccaggtccagctattcacatcgctggtgggctgagtaatattgctcgccccgcccataatcgccgtcatcaggtaatcctgctttacgcggctccaacgggtagtattgcgaatggtggtgttatcgttgatgtcgtgctcaaaacgcatggtggcggtgtcggtggtgctatcgtcgtaatcggaatccgtgccgtaaaagttatgagtatcaacttttccggaatgattcagggccgccgttcccgcagatggggcagaatagcccggcaaaccgatggtcggaatgccgccgtctggcgtgttgtgctgggtgacatgcagataattaagatacaaacgattcgctgtaccaaggccaaaagcgacagaaggggcgacgccgtaacgctcatttttgactttgtcgcgtccggcatcgtgcgttttttcgcccattacattcaggcgcaccgcggtggtatcaccaatgacctgattgacgtccagcgtgccgcggcggaaccaggcgctgccaatactggcggaggcgtcaatgccggaatcattgcgcggctgcttgctgatcatattgatgctgcctgtcggtgcgctgcgcccgtagtcggtgccggacggccctttaatcacttcgacctgctcggtattgaaggtgtcgcggctgacgctgccgatatcgcgaatgccatcaatataaatactgttagaggtatcggcaccacgcatataaatggcgtcgccagtggtggagttaccgttctcacccgcaaaaaacgcacccacgccggggacgtttttgagcgcgtcggtaaggttggttgcgccctgatctttaatcacttgttcagaaattaccgtcatcgtgcgggtagtatccgctaccggacggctgaatttcggatcggcagattgttgtggcgcataaaggctaggcgtacttgcttcgacaaccagcgtgtcatccgcgttagtttgcccttcggcggcgagtgcctgagccacaggcgtgatgccaatacaaagaccggcaaagaacgtgaggctatgaaattgtctggcagggaaattgcgattgttttccattttgcaggtgactttttcttatatgttgaaattttcactgccacgagaaagcctctctgcggatgcgatgccactgttaatcccgtgatagtgctcgtgaaagtgataataattttgataagcattatcacttggagcgattttctatcacccattgcgcgaaaaagaaatacatttatttacattgagttcatatttgatgttttttgattacaaaacagacgaaaactgcatccagaggcgaatgcagttacgttggtggggttatttgtagatggttgcagtaccgaacatctggtcatttccgcctgcggaattaatgacataacctttcgcgccttgttcgcgcgctttttctgccagtttatcctccagatcgcttaggttacttgcgccagttgcgctaacggtaccggcgggccgtagctgaccgctgtccaggttactcatcggttgcgcggcataagccgtgagagagattccgctcaggacggtggcaatcagtagtgtgaggcactttttcataatgacatcctcataaatacaacgggtagtgcctgataagtgtaggtcgcctgcgcgatgcaaatgacgcaaaaaattgacagagatgtgcttattttttgaacgatatatttttacaaaataagacaaatcaatgacatgcataatgctgatttttatgatgaattgccataaaccatagccatgttaaggttttggggaatgataaacgcagccagatatttaccctgtcgcgttatgcgggtatcttacgccgctgcttaaaggagaatgctatgtccgcccagaaaccggggttgcatccgcgcaaccgtcatcacagccgctacgatctcgccacgctttgtcaggtcaatcctgaactcaggcaattcctcacgcttacacccgccggggagcaaagcgtagactttgccaatccgctggcggtgaaggcgctcaataaggcgttgctggcccatttttacgccgtagcgaactgggatatccccgacggttttctctgcccaccagtaccgggccgggcggattatattcatcaccttgccgatttactggcagaagcaagcggaacaattccagcgaatgccagcattctggatatcggcgttggtgcgaactgtatttatccgctgattggcgtacatgaatatggctggcgttttaccggtagtgaaaccagcagccaggcgttaagcagtgcgcaggcgattatcagttctaatccggggcttaaccgcgccattcgtctgcgtcggcaaaaagagagtggggcgatttttaacggcatcatccataaaaacgagcaatacgacgcgaccttgtgtaacccgccattccacgattccgccgctgcggcacgggcaggtagtgagcgtaaacgccgtaacctggggctgaacaaagacgatgcactgaactttggcggccagcaacaggagttgtggtgtgaaggcggtgaagtcacctttatcaaaaagatgattgaagagagcaaaggcttcgcgaagcaggtgatgtggtttacaagtctggtatctcgtggtgaaaacttaccgccgttgtatcgtgccctgacggacgtgggcgcggtgaaggtggttaaaaaagagatggcccaggggcaaaagcagagtcgctttattgcctggacctttatgaacgacgagcagcgccgccgttttgtcaatcgccagcgttaaagcgttggttcccccggcggtaacggttcagccggggtcgcgcccggagcaggcagcacctgataagtctgcactggcgcgcgaacgcccgccaggtcgaaatgttttttcacctggctgtcgagggcaaagcgtaccgtccactgtttgagtggcagcgtggtgaagctaacacgcagtgtaaacgcggtattgcttaagccgacaatcccggcaaaattcggttcaccaataatcagcccgcgaatttcttcgttttccattaattccgctaccgcatctttcagtgcctgattggctttatcagcatcttcatggcgatcaacatcataatttgccaccacgctaccaatgccgcggacaaagttagcaaaggtggttatgctagaccacggaatgatgtgatacgccccggtatcctgtcgtacgcccacggagcgaatgctcatccgttccactgtgccggtcaacggcccgatagtcaccaaatctccagtgttcatgccgttttcaaactgaataaataccccggtgataatatctttcaccagcgtttggctaccaaagctgatagccagacctaatgccccggcacctgccagcaatggcgcgatattgacgccgatttcgctcaacacaatcatgatggtgatggtactgataatcaccgccagcgcgttacgaaacagcgtaagcagggtacgcgtgcgggcgctgggtagcgggcggccatgaatatcgctagccagccggttttcgatcaaactggcgagcaccgtccagccaaccgcgctgaagaaaagaatgagtgcgatacggatcaggatatctacggttttctgccccgcgccgttttgcagccagttccagaaatcgaacaatccccatgcgctcaacagcaacattaccgccacgcagactgtcagaatacgcgccgttttcagcgccgcgctcagccagccattcaaccgtttttgcagctccggatagttacgctgagtatgtgggctgagagtgatggttttcgccagccagcgggaaaacataccggaaacaaacgctgcgataccaataatcgccaggctgcgcaccgttgcacccatcataaatttcaggctgttgcccggatcgaacaagctaaagaaaaacagcacgataaaataggcgcttgccagccagtgccacaccagcgcaaaggcgcggataaacaggctgaaaaaggccaggctatgctccgcgaagttgagcaaatgctgggtaatctcttttttattacgaaagatcaggtacaacgcccagacggtcatgcacagcataatgatgacgttcgccagcgcacctatctgtacattcacctgattagagataatcggcacggccacaatcaggccataacctatcaaactgcttaaccagctcaggcgacgactccagtaacgggcgctctcgtcctgaatcgtgaacgggcgcagctccgccacgtttgggcaaaaaatcaggcgtagtacggctttgaaaaattcaatgagggcaaaggcgttgagaaacaaactttgttggaaagcgatggtgcgactgcctgcattcaggttgtcgcttaatacctggccgacaaataatgtcagggccagtaacagcaggtcgataataaacgccccgataatcatcgccggaagctgcaaccagttactgcgctcacgatttttttgccgcgcccactgacccattttgcgatacagcggcagtgcgcacaggcgaatcagccagtaaaaaccaaacactaataccgctaacatactaaaatgggtcagcgcattgctgaaggtttgtggattaaacggcttatgcggggagccggtgatattgcgataaagttgcccgaagcgggcggaaagggcttcaccataatggcggctgacttcggtgaccttttgcagcacggtttgctcttcgaccagcgtcggcggcactatttttggtaccggttcagcagggggcgtagcggcaacggtgcgcaactggtcgatcaactctttacggctggtgtcattatccagcacatccgccagtgcgccataggccgcttttttttgttcgatatccggttccggggccggttcagtcgtactgtccgttgtcgttgtggttgtaacgccgggtatggataccgcgtgggcaggtgcgcccagcaggcagaagaggatgaacaggatccaccgcatgactcctccagtgagaaaatagagcaaaaagataagtatagatgctggaggaggggcgattttaaatgagaggaatctggtgtgcctccctttcgggtgaaagggaggaagggatattaagcaggttgctgacaacgtgcgggcttttttgccggatgcggcgtgaacgccttatccgtcctacaagttcatgcaattttaataagttgccagatatcctgtaggcctgataagcgtagcgcatcaggcaatgtgtcttattaagagacgtgctgcaaaaattcctgcaagcgctggctcggcgggttcttgatcaacacctgcggattgccatcttccgcaatccggcctttgtcgataaagatcagccggctagctactttctcggcaaaaccgatttcgtgggtcacgatcaccatcgtcatcccttcttcagccagatcctgcataaccttcagcacttcatggcgcagttccgggtcaagagcggaagtcggttcatcaaacagcatcattttcggcttcaccgccagcgcgcgggcaatcgccacacgctgctgttgaccaccagaaagttcggaagggtagtgatgtgcacgttctgccagaccgactttcgccagcagctcacgtgccagtttttccgcctcttctttgttcgcgccacgcacgcgtagcgggccaaacatgacgttttccagcgctgtcagatgcgggaagaggtaaaactgctggaacaccatacctgcttcctggcgaatcaggcgctcgtcaactttcggatcgttaaccttcaggccatcgacaatcagatcgccggaggtgatttcttccagtttgttgatgcagcgcagcagggtgcttttaccggaaccggacggcccgataatcaccacgacttcgccctgggcaatgttcaaatcgatattgtgcagcacctgggttgggccaaagtgcttggagacgtttttaaattcaatcacaggattttcatccttctttccagacgacgcagaataaagctcagcaccagggtaataatcagatagaacaccgccacggcgctccagatctcaagggcgcggaagttaccggcaataatttcttgcccctgacgggtcagttccgccacgccgatcacaataaacaggctggtgtctttaatgctgatgatccactggttacccagcggcggcagcatacgacgcagtgccagcggtaaaatgacgtagcgaatggtttcccaacgactaagaccgagcgccagtcctgcttcacgaaaacctttgtggatagacagcaccgcaccacgcgtgatttccgcaatatacgcgccggagttgatcatgatggtgaccaccgccgcagtaaatgggtcgatgcgtaagtcgttaaacgccatcggcagggcgaaataaataaacatcacctggacgacgataggtgtgccgcggatcacttcaataaagaccagcgcgacgtggttggctatccaacctccgaaggtgcgtgcaaaacctgccagcaatccgattaccagaccgcctgccagaccgaggacgctaatccacagggtcattttggcaccttcaatcagaagcggaatggcaggccagatggcactccagtcaaactgcatatgttgttcctgttaccgtggtgtaaataatcaaattcagggtaattaatggccccggagcgggtttgcgcccctcaccctaatcctctccccataggggagagggaactgccagtgcgttttacaggtgtagcgttattatttcggttcagtaccgaaccattttttgtagatttcgttgtaagttccgttctcgcgcagggttttcaacgcgccgttgactttgtcacgcagctcgtcgctacctttcgggaacgcaataccgtattgctgcgcttccagagagtcacctaccgctttgaactgaccgttaccggcggttttgatgaagtacagaatgtttggcgtatcgtgcagaacggcgtctgcgcggttggtgcccagttccatataggcgttatcgatgttcgggaactgacgcagatctttagttttgatgtttgctttcgcgtaatcaacggagccagtaccgctcttcacagcaaccactttcccgtcgagatctttcacgcttttcacatcgttattgttagctttcaccatcactaacaggccgcttttgtagtagccgtcagagaaatcgatcgcttttttacgctcgtcggtgatggtaatgcccgccagcgccagatcgacgtttttggtttgcagtgccggaatgatcccactgaaatccatcggcttcagttcgtaatccagcttcagctctttagcgatggcagcccacagatcaacgtcaaagcccacatatttatcgccctgtttaaattcaaacggaacgaaggcggtatccgtcgcgacaactaattttttatccgcggcatgagaagaaaccgcaaaagccagggtcagtgcagccagactaacttttaatacagacttcatagcatttccttttttctatccacgggacgatcccctgcgtgacattcacatatatgaaaaaatcgtgccagttttgcaactccttgatttttcgagatgcggcaaaaacgtgatgcacgatttatagggcaataccctgaagatgcaccattctggggcaccaatctggtgcgctaaaattgtgcactcaacacagtgattatttagcgtaaaacctgatgaaaaaacaatctttatgtaacgattgtgtgatgatgtggatacaaaaaatttacttaatcagctggagatagcagatggatgcactaaataagtgcgttgaggtgggctgcaaaacaaaacggcctcctgtcaggaagccgcttttatcgggtactaaagttctgcaccatcagcgatggatttattcgatgttagactcgataaaccacaggaatttatccaggtcgcgagacgcggcggtcaggatatctgcggtgtcgtcatctttcgcttcgccaatcgctttgcgtacgtcattagcgacgattgcgtaacggtcagccagttctttcaggtgatcctgaacgttgtggatgtccagcgggtaacttttcagcggggttttgctgttgataacttgagtggtccccagagctacaccgcccagctgcactgcacgttctgccatggtatccagatgatcgatcagtgcggtgcggaagccatccagcatttcatgtacggcaatgaagttagcgccgcgcatgttccagtgcgcttgtttggtaatcaaagaaagatcaataaactggataacctggcgattcagcaactctactgttgcttttttctcgctgtcggagacatcgttgcgggtataaagcagattggtcgctttacttttaactaatttagcggtactcataatttcatatcctcttgatgttatgtcccagtaattaacgagattaagtatagcaccggctatgtgttccgctattctggctgttcctatcacactaatagtggtaacaagcgtgaaaaacaaaactaataaagattcaatgagttagatatattgataagaacaattcttatttatctgctcgccaggaattttcggaataaatatgcttttgcataattcgatatataaagacggtgtagaggaaaagtagcgagaaattctgcatggttatgcataaccatgcagaaatgtaaatttaattaatgtctaattcttttattttgctctctttgcgtactgtcagcgtagaccccatactagcggcgatgatagcgccgagcgccagtagctgtatgggtgtcagtgtttctccgaggaaaatcatcccggaaacggcagccagcgccggttccatgctcatcagcgtaccaaatgtccgtgttggcaaacgggtgagggcaatcatttccaggctataaggcagagcggtgctgagaatagcgacagccagacccaatggaataacgctccagtgccagagtgcttcaccagcctgaagcgctccaattggcacgaaaattaacgctgcaatcaagctaccaattgccaccgtcgcagggccatgttccgctcctgcgcgttgcccacttaaaatgtaaatagcccaacaagccccggcccccagtgccagcgcacagccggttaaatcgacatgggaaacgtcttgccccagcggtagcaggaaccacagaccaagaaccgccagcacaacccagacgaaatctaccgggcgacgagaagagaacagcgccaccgccagtggtccggtgaactccagcgccaccgcaatacccagcggtactgtctgaatagaaagataaaaaagataattcatcccacccaggctaacgccgtaaaacaacagcggtaaccgttgctctttggcaaagcgcagtcgccatggcttaaagaacgcgatgaggatcagcgttcctaatgccagacgcagcgcagtgacacccggtgcgcccaccagaggaaaaagactcttagctaagctggctccaccctgaatagacgccatggcaacgagcaatatgactattggtaaccagaccggcattttacgtaaactaccaggcatcctttctcccacaaatatctagacttaagtaaagcgtggagtgtactggatatacccaatgctggttgagcatttgttgaaaaaattttcccccgttttgactaaaatgcgccaggattgatggaatcattagtctggtgattaggaataatctggatgaatgacagggaaaacatgcgtaatacttacgcagttctctgaaaaagtgatttaaatttagatggatagcggtgtatggaaacgttctgttacatgaaatggcccgttagacatcacaaatcgcgaagagtttcccattaatttttgatatatttaaaacttaggacttatttgaatcacatttgaggtggttatgaaaaaaattgcatgtcttagtgcactggccgcagttctggctttcaccgcaggtacttccgtagctgcgacttctactgtaactggcggttacgcacagagcgacgctcagggccaaatgaacaaaatgggcggtttcaacctgaaataccgctatgaagaagacaacagcccgctgggtgtgatcggttctttcacttacaccgagaaaagccgtactgcaagctctggtgactacaacaaaaaccagtactacggcatcactgctggtccggcttaccgcattaacgactgggcaagcatctacggtgtagtgggtgtgggttatggtaaattccagaccactgaatacccgacctacaaacacgacaccagcgactacggtttctcctacggtgcgggtctgcagttcaacccgatggaaaacgttgctctggacttctcttacgagcagagccgtattcgtagcgttgacgtaggcacctggattgccggtgttggttaccgcttctaatcactttggtgatataaaaaatccgcctctcggggcggatttttgtttttaaggtttcgggtcgaaaatatcggttccgagatggttgtaatccaccttctgtaactggaagttggtgatgtatatcggcccggctttcttctcagatataaacgggtatttgatgttaatttccttcgctttaatccccgtccactgggagaaaaagcctaagaagtcattggcactgcggcgggctttaatcacacgatgcgctttatcgtcgctggaaatgaccataaaaggcacctggaaattttgctgatatttatcatcatgggcaaggtattgcacgtctttaccgcgctctttaaaggccagaccgtggtcagaaaagtaaaccaggctgaagctgctgccgctgttgcgtaactgatcgtacagcttgcgcagtaaatcgtccgtttgcgtcatggtatagagatagcagctcgtttctttgctttgcacaaaggtttcgtattttccttgtgtcctgtcgcaggcctgcggatgactgcccatcagatgtagaacaatcagctgcggttggctgtgctcttgcgccagcacttgagcggtcatatccagtaacgcttcgtctttggtgtttttatctgcttcaaaattaccttctttcaggaagtacacttcatctgctcgtttggcgatgctggcgatagcggtatcgtattcgccgatttgaccctggttggaaaaccaccaggtctggaagcccgcgcgatttgccagggtgacaaagttatcctgaaactgtggtttgccatcgacaacgcgattgagcgttaagccaaggcttttctgcgtggagccactggcggcaatgtagtcagcaaatatcaaaccgttaacgctgctggcaaacggggtattgtcccagtgaccgccaaaggcaccgagggcatcgcgacgcgcgctttcaccgatcaccaccacataggtctgatacttcggcttaacggcagtgaccgtccaggtatctttcattccggaaagttttgccatccgttcttgctcttcaatcacctcgttattattgacgatgacatccttagcaaaacgaaataccggatagccagtatctttcagtttaaatacgccaccccaggccaggttttgcacgggagcaacaaaaaatgtcgccacactgaataccagacacaggctgtcgaaggtattccagcgcgctttttcattctctttttttcgcctgattgctattacgccgagcgcaaaaataaataagccgaccaggtagctgtaccacggaaaaatcgtcaggatttcggtgctctcttccatattggtggagtgcaatgccagcaatgtattgaaattaggcgcgccgtaggcctgagcaaaagggaaataacaagccgccaccaggctactgacaccgaccagaactttttgtacgcgaggcaatgttcgccatagcaaaagcaaaatagccgtaaacgcagcggtgtagagcaaactgaaggggtaacctaagccgaggttaattaataggctctgtaaaaagtagaacgcagtccacgggctaaatacccggctacgggtaacaaggctttctttgagggttaaattcatatgccactatcgtaacaaacgccatgtgcttaccctggcgtcaagggtcaatacctgcaagagtgcgtgaagagtggaaaggggtccgcatccgcgagccgcaatatacgcagggctgcaagaagatagagcgagccgccgtagtggtcaactactgacgaacaaatcttttgcgaaggggattgcaaatccgacaaaaagtggggtttttcagaccaaaacgcgttatgcctgcatgaaagcaggagtgaagcggcgtaccgcgacgccgctatttatcggaaggtttatcttgctgcggtttgttgttgaccatatcgcacaacatagagagcagcattaaccgtactttaaagggagaatgactaaacacgcgcatacacctcttgaactcattcataagacctcctgacttgctaatcccgtcgatccttgaggggtgattgcattacatacagatatagcacaggctatattatatagctattgctaaaacgttaattttttgtaccttcgcaactctggtttacaatgtgcgcacgaaatgagaacgctatgtatgcgtcaccataatgaggaagcacaatgagtcgtcgcgcaggtacgccaacagcaaaaaaagtgacgcagttagtgaacgtggaagagcacgttgaagggttccgccaggtcagagaggcgcatcggcgcgagcttattgatgattacgttgagctgatttctgacttgatcagggaagtgggggaagctcgtcaggtggacatggctgctcgtctgggagttagccaaccgacggtggctaaaatgcttaagcggctggcaaccatggggctgattgaaatgatcccctggcgtggcgtgtttttaacggcagaaggagagaagctggcgcaggaaagccgcgagcgacatcagatagtcgaaaatttcttgttggtgttgggcgtcagtccggaaatcgcccgtcgcgacgcggaaggcatggagcaccatgttagtgaagagacgctcgacgcttttcgtttgtttacccagaaacacggtgccaaatgagcctgccttttttacgcacgctgcaaggcgatcgtttttttcagttattaattcttgttggtatcggattaagctttttcgtgccctttgcaccgaaatcctggcctgctgctatcgactggcacaccatcatcaccttaagcggcctgatgctgctgaccaaaggtgtggagttaagcggttattttgatgtgctggggcgcaaaatggtgcgccgctttgctacggagcgtcggctggcgatgtttatggtgctggcggcggcgctgctttctacctttctgaccaacgatgtcgcgctgtttattgttgttccgctgactatcacgctaaaaagactgtgtgagatcccggttaatcggctgattatttttgaggcgctggcagtcaacgctggtagcctactgacgccaattggcaacccgcaaaatattcttatctggggacgttctggtcttagctttgccggatttattgcccaaatggcaccgctggctggcgcaatgatgctgacgctcctgctcctgtgctggtgttgtttccctggaaaggcgatgcaataccatacgggggtgcaaacaccggagtggaaaccgcggctggtgtggagttgtctggggctgtatatcgtctttctgacggcgctggagttcaaacaagagctgtggggactggtgattgtggcggcaggctttgcgctgctggcacgtcgcgtggtgctcagtgtggactggacgctgctgctggtgtttatggcgatgtttatcgacgtccatttactgacccagcttccagcgttgcaaggcgtgttgggtaacgtgagtcatctatctgaacccgggttatggttaacggcaatcggtttaagccaggtgatcagtaacgtgccgagtaccatattgttgctgaactatgtgccgccgtctttattactggtatgggcggtaaacgtaggtggctttgggttattacccggaagcctggcaaatttgattgcgctacgtatggcgaacgatcgccgcatctggtggcgtttccatctctatagtataccgatgctgttgtgggcggcgttggtgggatatgttttgttagttatactcccggccaactaaggtctggcaaataaaaaaggcggattatgagtccgccttttgctttaagttttgaagattaattcagacgaaccggcatcccggagcggtttttaatcgcttcatcaagaacaacctggtcaacatctggctgaccggtcactgtctgcacgctcttcgtcagggtaattggcacaatttcctgaccttcaaactgggcttcggtggtagacagcgggttatggacttcaatataacggctgccgtctggctcggtggtcgcttttaccggctcatcaataaactgtacgcgggtaccgaccggtactttctcgaacaggaatttgatgtcttcgttacgcagacgcacacaaccatgacttacacgcaggccgataccgaagttggcgttggtgccatggatagcatacaggcgaccgatatagagtgcatacagccccatcgggttatccggacctgccggaacgacagccggaagcggttcgcccgcagcgcggtactctgcgtgcattttggcggtcggcgtccaggtcgggcctgcttttttacgctcaactttggtggtccagttgataggcgtatctttgcctaactgaccaatgccgatcggcagcacgataacggtgttggtccctttcggatagtaataaagacgcatctcagcactgttaatgacgatgccttcatgaacggtatccggcaggatcagctgctgcggaatgttcagtacagtaccgcctttcggcaggaaggtatccacacccgggttcgcttccatcatattggaaagccccatctggtactcggcggcaaaatactccagcggctgagtgttaccttcaggaatggtgatcacctgattctgaccaaccaggcgactcccgtcggttggcagaggataagttaccgcagaggcggtactgcaaaagccgacaacagcgaaggccgctgcgaataatgttttcaatttcatattcatgttaagcgagattttgtgcctggcaggccattgggttgagaatattagagtattggaagcgcattataagttcattccagctcacagtgaaatcagatgtgtacgaaatcacattttttgcctttggcttgagtgtagaccttaagcgaggagcaggatcttctttcagacttatggcataatgcgcggtttgtcatatctcttttcaggatacgcctgtgttagtttccagtaacgtcaccatgcagttcggcagtaagccgttgtttgaaaacatttccgtcaaatttggcggcggcaaccgttacggcctgattggcgcgaacggtagtggtaaatccacctttatgaagatcctcggcggcgaccttgagccgacgctgggtaacgtttccctcgatcccaacgagcgcattggtaaactgcgtcaggatcagtttgcctttgaagagttcactgtgctggatacggtgatcatggggcataaagagttgtgggaagtgaagcaggagcgcgaccgcatctatgctttgccggaaatgagtgaagaagacggctataaagtggccgatctggaagttaaatacggcgaaatggacggttactctgcggaagctcgcgccggtgaactgttgcttggcgtgggaattccagtggaacagcactacggcccgatgagtgaagttgctcctggctggaagctgcgtgtgcttctggcgcaggcgctgtttgctgatccggatattctcctgctcgacgaaccgaccaacaacctcgacatcgacaccattcgctggctggaacaggtgctgaacgagcgtgacagcaccatgatcatcatcagccacgaccgtcacttccttaacatggtctgtacccacatggcggatctggattacggcgagctgcgcgtttatccgggtaactacgatgagtacatgacggcggcgacccaggcgcgtgaacgtctgctggccgataacgccaagaagaaagcgcagattgctgagttgcaatctttcgttagccgctttagcgccaacgccagcaaatctcgccaggcaactagccgcgcgcgccagattgataaaatcaaactggaagaggtgaaagcctccagccgtcagaacccgttcatccgttttgaacaggataagaaactgttccgtaacgcgctggaagtggaaggtctgaccaaagggtttgataacggtccgctgtttaaaaatctcaacctgctgctggaagtgggtgaaaaactggcggtactgggtaccaacggcgtcggtaaaagtacgctgctgaaaacgctggtgggcgatctgcaaccggacagcggcaccgtaaaatggtctgagaacgcgcgcattggttactatgctcaggaccacgaatatgagtttgaaaatgatctgaccgtgttcgaatggatgagccagtggaagcaggaaggcgatgacgagcaggcggtacgcagtattctcggtcgtttgctgttcagccaggacgacatcaaaaagccagctaaagtgctttccggtggggaaaaagggcggatgctgtttggtaagttaatgatgcagaagccgaacattctgatcatggacgaaccgaccaaccacctggatatggaatccattgagagcctgaacatggcactggaactgtatcagggcacgctgatctttgttagtcacgaccgtgagttcgtaagctccctggcgacccgcattctggaaatcaccccggaacgcgtgatcgactttagcggtaattacgaagattacctgcgtagtaaagggatcgagtaagtgattatccgtcaccccgatactgtcggggtgacggcggctgatgacaaatgcaaaatagcctgatgcgctacgcttatcaggcctacgcagtacctgcaatatattgaatctgcaggactttgtaggccggataaggcgttaacgccgcatcaggcattaacaaagcgcatttgtcagcaatctgagtaacgtcgaatcgattttcttaatcccacatcaattcacttccattaattctcaaacatccatgcccaacgctcgcttaccgtgaatgttgaggtcggcaagcgtaaagcgtccttcccagtttgtttcatagtcctcgcgcgggaagtcgcccgggcttgcgcctttttccagtgcggccttcaccttgtgcgcgtaggcaagatttttctcgcacatcggtgccgcaggaatgtacatcacgttgccccaaccttgttgattttcaacgggggcaacggaatggatgacgtcgcagtgccaccagacggagtctccggcttcgagttttggaatgctggttaacgcctcaatcaacagtggatgccattgctcacttaccggcaatactcttccgggcgctacgccgcacagttcatcctccggcacatcatcaagcagcggacgtaacagtacgtacgccatagcttcaggaatgggcacgacgtgcagcagcccctgaccaggcagcatatcagagagcgctgtccagccctggaatgtccgaaacacggaacatttggtggtgttgtccaccgtgtactcttcaacttccgtacgatgtgccgcatgccagggatcatattgcgccagattgccattaaagacgttggcgaaaacgcgctgatacgctggaagcagccagcgttccagtgccccggagtcggtatgcgctccaagacctttggaggtcgttccgggcggacggcggcggatacggtcagggtagatgacgctcacatccgggttaaaccattgctttccatcactttcaaatgtccacagacgattgagaaagctctgcgcattcgccatttcttcactctggcgggcctgcatttgcgcctggctccagtagatggggtaaatctcgggacgactagcgctgagcgtcccgaagaaattatcgccggggcctttgtagacctcgtcaaagcggttgcggtccagatagtccagcatgctctgatcccagcctagcgcttgttcgcgggggaaatggccttttatcaccgcacaaccgcgacgtttaatctgttcgcgctgctctgcagtaacatgacctgctttgatatcggcataagacagcaccggccagacggcatcgccctgtgctttgagtgcgttgatttcagccactcgcgtggcaatgtcatcgcttagctgattaaagatctgctggacgtcgccaagctgcgcccgcagcgcgtgcttcatctgacggatagctgctttgtgatcggcaggcaatgtgtcgctggtaaaagtagaagccataaccacctctcattaactttcattcgaaaccattctgatttgcatgtgacaatataagttataaataagttaatgcaagtttaatgatttgatgtgatgtacaggatgtaaaaagaagggaaaaccggagcgcacggctccggtagagaggtcagctgttaaaaggggatgtgttatccagcaccgcctgaatcacattcagcgcgccttcatgattattatcatcggtagcgtaacgggcgatttgtttaatgttttccgcagcattgcccatcgcaaaggaataacgcgccattttcagcatctccgcatcgttaccgctgtcgccaatcgctaccacattttgcggactcagatcccagcgtttcagtaaccggctaataccgtttgctttatgtagaccgggaataatcaggtcgataaagccaaaaccactggtaacgggtttcataatgccatcgagcgctacgtgcagtttgtcgatcactaacgggatttgttcatccggcaggttgaggctaaacttgaacagtacgtcgtcaatctcctgataatcttttacaggtttcaggcgatggtagtgttttgccatcagtgcgacaaatgcttcgggggcattttcgctgacatatgcactttgcagaccgcaggcgacaaaattgagttgcttatcttttagcaactcgccaataacaatccggctttcatgtcgggtcagttcgccgtggaacaactgcttgccatgttcgtaaaccagtgcgccgttttccgcgacaaaagagatctcatcctttagctcaggaaagaaactaataagctggtaatactgattaccgctggcaacaacgaacttaatgccgcgctttttcagttcctgatattgcgccataaaacgtggttggttgtacgttttggcgtcgttaagaaaagtaccgtccatgtctgtgacgataacttttacgctcataggtgtgctcctggctcgaaaatgaaaccgtaacagtgtaataacaatgtgacgcagagcacaaattatatttcgaatgaaagtaaggatgaaattgatgatgtgaatgatttagcccggcgacgacgccgccgggccgaggagattacagcatatgttcagtacgggcgatgatatcgtcctgagcgtctggagagagcgcggtgaagaacgcggaatagcccgcgacacgcactaccagatcgcgatactgatcgggatgttttttcgcatccagcagcgtttcgcgggaaacgatgttgtactgaatatgccagcctttatgcacttcaaagaaggtacgcagcaggatcatcagtttctgcttgtcagattcgttctccagcgttgccggattcagtttctggttgagcaacacgccgccgagaatcgctgccgtaggcagtttacccacactgccaatgaccgcagtagggccaagatggtcagtaccggaggccgggcttgcgccttctgccagcggggtgtgggctttacgcccgtccggtgttgccatagtctgcgcgccaaacggtacgttagcggagatactactcgtacccgcgtaatagttgccgccaaccggaccacgaccgtagcgcggattatggtactgtttcagttcgtcgatataggtctgataagcgcgagccagcagcgtatcgacagtatcatcgtcgttgccgtacttcggcgcaccgttaatcagccgctgacgcagctgctcgtgagtcaggccgtcgaagtcatctgccagtgcggcagcaagctgttgctgaccaatcgcaccttgttcaaacaccagtttcttcactgccgccaggctgttgccgaggttggcaatgccgacctgcaggccagaaacccagtcatatttcgcgccgccttgcttgatacttttcgctcgctcaatacagtcatccaccagcgcgctgcagagaatatcgtgcacgttctcttccagcatggtgtcgacgacatattcgatttcgatacttttgcgggtgtagtaacggatttgcgtatcccacgcgtccatcacttcatcgaagttgttgaagttacctgcgctcaacgctttttcttgtggcaggaacactttgccgctggtggcatcatgcccgccttccagcgccgccagcatcacgcgggcgaagttgataaagctcatgccggtacagcgatagccccatttgccaccgacggcggtttctatacaaccaatcgctgcgtagtcataagcgtcctgcggttcaataccgagtttaataaattccgggatcacgatttcgtcgttgttgaacgccggcatcccgaagccgcaacggatcacctgtacgcaggcgtcgaggaaatcgttgctcattcctgcatggtaacgcacgctgaggttaggctgagtggaacgcaggcgaccgcaggattcgaggatcgcgtaagagagtggattcaccgcgtccattggttgaccatcaaccagattttgcccgccaatagtgacgttctgatacagcggacttcccgcagaggctttactgtgactgccggagcggatcttgttcacttccagcagtttcagccagcagctatgcagcatctcgatggcgtgttcgcgatccagcgtctggttgagttcaacgtcgcggcgatagtacgggtagagatactggtccatacgaccaaagcttacactgtgaccgttagattcgatctgcaaaatcaactggatgaagtaacacagttgcagcgcctgccagaaagtctgcggcggctggtgggcgataagatcgcagttttctgccatcgccagcagttcatcgcgacggctttcgcgggtttcggtcgcggccatttcacgcgccagggcagcgaaacgttcaatgtgttcactgactgccaccagcacgatatcaatcgctttcaggaattgctcaccgtgtaaatcttccagcaccgtcaggttgatgcggctgcgacgttccgctacttcctcgcgcagaccatcaagccctttttccagcagcagcgggaaattcaccgccaggtgcgcatcgccggaggtcatattgccttccgctttaatgattccggtcgccagcagacctttttgctcatcggtaaacatgccgtagcagcgatcctgtacggtctgaccgcgccaccacgggcacacttcatgcagaacgcgtttgttctcttcgctcaccgcaaagccagcaccgggacgatctgccagatcatcaatctctttttcgatccagctgacagtatattccgggaagatcggcgcggcgcgaacttcgcttgcctggttgccaatgatcaactcatcgtgtttgatccagatggtgcgattcgccaggtgatgcgccagtgccagcgcgcgacgtaccgggatcggcttatcgagatgttgttgatacatctcggtatagtgctgcgcgcgctcggtacagactggcggtttcacaatatgcaccagcgcatttttgtgcgctttaatgcggtcgctgagcgtgtccagtttcagtgtggtcatggttgttatcctcgtaaggtcgcggttaaccctttctggcaggcatactgctgggcaaagtcgagcagttctggcgcatcaagcggtttttccggggcgtcatagggcagattaagtaagtgatatttgttgatgcccagcgtgtggtagggcagaaaatgaatttcgccaacgtgcagctcgtcggcggcaaaatcggtaatggcttttacagaggtttcgtcggcattaaagccctgaatcagcggcacgcggataatgatttttttgcccgctgcggcgagttttttcaggttatccagcactctggcggcgttaccgtcggtccactgtttaaacggcgcgtcggcaacgtgttttaaatcggcaagaaacagatcgatatagggcagagaaggggcgatatatttccacggcacatgcagacaggtttctaccgcagtatgaatgcctgcctcgtggctggcttgcagtagcgccatcgccatttccggctgcataaagggctcaccaccgctaagcgttaaaccgccgccgctgcgatcgtaaaacggtttatcgcgcagaacggtcgtcatgatctcctcaacgcttttcacttcaccacacacggttaatgcctgtgtcggacagcagtcggttaacgccgtcagatgctccggggttaacttttcccgatgaataagcaaaccattcagcgcgcgctcaatcacttccggcgcggccttagcgcacagctcgcagccttccagacacagtcgtgcgtcatacagcagatcctgcgtgcgggcgcggctttccgggttctgacaccagcggcagcccaggctacagcctttaagaaatacgaccgtgcggataccggggccatcatgggtgctgtagcgctgaatattgaaaatcatagttgcctctctatttcgttcaagcattaaaatactttcgaatgaaagttagattgatgtgcgtcaactgttcagagagttttcccgtgatagtctacattcagacaaaaagtacattttgaggatggttatggaactgtatctggatactagtgacgttgttgcggtgaaggcgctgagtcgtatttttccgctggcgggtgtgaccactaacccaagcattatcgccgcgggtaaaaaaccgctggatgttgtgcttccgcaacttcatgaagcgatgggcggtcaggggcgtctgtttgcccaggtaatggctaccactgccgaagggatggttaatgacgcgcttaagctgcgttctattattgcggatatcgtggtgaaagttccggtgaccgccgaggggctggcagctattaagatgttaaaagcggaagggattccgacgctgggaaccgcggtatatggcgcagcacaagggctgctgagcgcgctggcaggtgcggaatatgttgcgccttacgttaatcgtattgatgctcagggcggtagcggcattcagactgtgaccgacttacaccagttattgaaaatgcatgcgccgcaggcgaaagtgctggcagcgagtttcaaaaccccgcgtcaggcgctggactgcttactggcaggatgtgaaagtattactctgccactggatgtggcacaacagatgattagctatccggcggttgatgccgctgtggcgaagtttgagcaggactggcagggagcgtttggcagaacgagcatttaaccggacgttctgcatcctcataaattgctgatgacgtggcggagtgccgcgtcttatcaggcctggaggtggcaattactgcccacacacctcacaccccggattacgcatcagtttcatttcgcgaaactgacaggtcatcgcatcgtacatgacgattttcccgctggccggtttgccataacctgccagcattttgatcgcttccattgcctgcaagctaccaattacgccgatcaacggtgccattacgcctgcttccacgcaggttaatgcattttcaccaaacaaacggctaaggcagcgatagcacggttcaccgtcctgataagtaaagacggtgatttgaccttccatacgaattgccgcgccggaaaccagcggtaccttcgcggcaaaacagcctgcgttcagttgattacgtaccgcaacgttatccgtacagtcgagcaccagatcgtgttcagcaatcaatgctgcaagttctgcgtcatccagcagtgcattgactggcgtaatcgcgatatgtgggttgatccgcgtcagggcgtcacgggcggattccaccttcggttgcccgaccgtggcatcactgtgcagtgtctggcgttgcagattgctgaggctaaccgtgtcgaagtcgagcagcgtcaggttaccgacaccggcgcttgccagatactggctggctgcacagccgaggccgcccaggcccactatcagcacgcgagaatctttcagcgcctcctggccgtcaaaatcaaagccgcgcagaatgatttgccggttgtagcgcagcatctcctgatcgctgagttccgccattacaggcctccgaacaacgcgttaaacggttctacttccacccattcgcccacttccacattgccgcgatcgcgttccagcacgataaagcagttgccgaggctaaaggagctaaatatatgactaccctgatgtccggtggtcgtcacttccagttcgccatcggcgttgcgttgcagcacgccgcgctggaaatcaagacgtcctggcgtttttttcaggcgggacgctgtgcgtacgcgctggcgcgcgggcaggccgctggcggtgttaccgcttagttttgccagcaaaggctgtaccagttgatagaaggtcagcgtcgcactaaccgggttgcccggcaggccgcagaaccagctattgctgagtttaccgaacgcgaacggtttacctggtttaatcgccagcttccagaaggcgatctcccccagctcttcaagaatcgttttggtgtaatccgcctcacccacactaacaccgccggaactgatcaccacatccgcctggctgtcggcttcaataaatgcggcgcgcagggcatggggatcgtcgcggataatccctaagttaattacctcgcatcccaactgttctaacatcaggtgtacggcgagacggttggtatcgtagatttggccgtcgcccagcggctgaccgggcaactggagttcatcaccggtagaaaaaagcgctacacgcactttacgaatcaccggaacttcggcaatccccagactagcaattactggcagctctgcggtagtcaggcgagttcccgccgggaaaacaaccgcacctgcagagatatcttcaccgcgacggcgaatattttgcccgctacgcacttcagcagtaaaacgcacgccattgtccatttgttcagtctgctcctgcatcaccaccgcttcgcagccttccggcaccggcgcaccggtcataatacgaatgcaggtacccgcaggccattcaccatggtatggctgaccggcaaaggatttaccggcaacgggcagcggttgcccggaggcaatatcggctaaacgcaccgcgtagccgtccattgcggagttatcaaaccccggaacatcaagcgggctaacgacatcgctcgccagaatacgaccaaaacactgtaccagtggcagcgtttcctgggcggtcagtggggtgacgcgagaaagcatctcattaagcgcggtgtcgaggctcatcaatccggtggtaaattccatgaaaacactcctgcggaggcaaaatcgaatttgcctattatgtcagaaaaacgccacagactgtatgccacctcgggcgtagcgctgggtcctgcctttacatgccatatccatctttctatattcaaaaattgaatgagtaattcataaaaattctgatatttatagcaaaagtggcgaaccacccttaatggacgaatactatgggcaaagcagtcattgcaattcatggtggcgcaggtgcaattagccgcgcgcagatgagtctgcaacaggaattacgctacatcgaggcgttgtctgccattgttgaaaccgggcagaaaatgctggaagcgggcgaaagtgcgctggatgtggtgacggaagcggtgcgtctgctggaagagtgtccactgtttaacgccggaattggcgctgtctttacgcgtgatgaaacccatgaactggacgcctgtgtgatggatggtaacaccctgaaagccggtgcggtggcgggcgttagtcatctgcgtaatccggttcttgccgcccggctggtgatggagcaaagcccgcatgtgatgatgattggcgaaggggcagaaaattttgcgtttgctcgtggcatggagcgcgtcagcccggagattttctccacgtctttgcgttatgaacaactactggcagcgcgcaaggaaggggcaaccgtcctcgaccatagcggtgcgccactggatgaaaaacagaaaatgggcaccgtgggggccgtggcgttggatttagacggcaatttggcggcagccacgtccacaggcggaatgaccaataaattacccggacgagttggcgatagtcccttagtgggtgccggatgctacgccaataacgccagtgtggcggtttcttgtaccggcacgggcgaagtcttcatccgcgcgctggcggcatatgacatcgccgcgttaatggattacggcggattaagtctcgcggaagcctgcgagcgggtagtaatggaaaaactccctgcgcttggcggtagcggtggcttaatcgctatcgaccatgaagggaatgtcgcgctaccgtttaacaccgaaggaatgtatcgcgcctggggctacgcaggcgatacgccaaccaccggtatctaccgtgaaaaaggggacaccgttgccacacagtgatgaacttgatgccggtaatgtgctggcggttgaaaatctgaatattgcctttatgcaggaccagcagaaaatagctgcggtccgcaatctctcttttagtctgcaacgcggtgagacgctggcaattgttggcgaatccggctccggtaagagtgtgactgcgttggcattgatgcgcctgttggaacaggcgggcggtttagtacagtgcgataaaatgctgttgcagcggcgcagtcgcgaagtgattgaacttagcgagcagaacgctgcacaaatgcgccatgttcgcggtgcggatatggcgatgatatttcaggagccgatgacaagcctgaacccggtatttactgtgggtgaacagattgccgaaagtattcgtctgcatcagaacgccagtcgtgaagaagcgatggtcgaggcgaagcggatgctggatcaggtacgcattcctgaggcacaaaccattcttagtcgttatccgcatcaactctctggcgggatgcgccagcgagtgatgattgcgatggcgctgagttgccgcccggcggtgctgattgccgatgagccaaccaccgcgctggatgtcactattcaggcgcagatcctgcaattaatcaaagtattgcaaaaagagatgagcatgggcgttatctttatcactcacgatatgggcgtggtggcagagattgccgatcgggtactggtgatgtatcagggcgaggcggtggaaacgggtaccgtcgaacagatttttcatgcaccgcaacatccttacacccgtgcgctgttagctgctgttccgcaacttggtgcgatgaaagggttagattatccccgacgtttcccgttgataagccttgaacatccagcgaaacaggtcccccccatcgagcagaaaacggtggtggatggcgaacctgttttacgagtgcgtaatcttgtcacccgtttccctttgcgcagcggtttgttgaatcgcgtaacgcgggaagtgcatgccgttgagaaagtcagttttgatctctggcctggcgaaacgctaagcctggtgggcgagtctggcagcggtaaatccactaccgggcgggcgttgctgcgcctggtcgaaagccagggcggcgaaattatctttaacggtcagcgaatcgataccttgagtcccggcaaacttcaggcattacgccgggatattcagtttatttttcaggacccttacgctagcctggacccacgtcagaccatcggtgatagcattatcgaaccgctgcgtgtacacggtttattgccaggtaaagacgcggctgcacgcgttgcgtggttgctggagcgcgtgggcctgttacctgaacatgcctggcgttacccgcatgagttttccggcggtcagcgccagcgcatctgcattgctcgcgcgttggcattgaatccaaaagtgatcattgccgacgaagccgttagcgcgctggatgtttctattcgcgggcagattatcaacttgttgctcgatctccagcgtgatttcggcattgcgtatctgtttatctcccacgatatggcggtggtagagcggattagtcatcgtgtggcggtgatgtatctcgggcaaattgttgaaattggtccacggcgcgcggtcttcgaaaacccgcagcatccttatacgcgtaaattactggcggcagttccggtcgctgaaccgtcccgacaacgaccgcagcgtgtactgctgagcgacgatcttcccagcaatattcatctgcgtggcgaagaggtggcagccgtcagcttgcaatgcgtcgggccggggcattacgtcgcacaaccacaaagtgaatacgcattcatgcgtagataacattcaggcggagaataaaatggcaagagctgtacaccgtagtgggttagtggcgctgggcattgcgacagcgttgatggcatcttgtgcattcgctgccaaagatgtggtggtggcggtaggaagcaatttcaccacgctcgatccgtatgacgcaaatgacacgttatctcaggccgtagcgaaaagcttttaccaggggctgttcggtctggataaagagatgaaactgaaaaacgtgctggcggagagttataccgtttccgatgacggcattacttacaccgtgaaattgcgggaaggcattaaattccaggatggcaccgatttcaacgccgcggcggtgaaagcgaatctggaccgggccagcgatccggcgaatcatcttaaacgctataacctgtataagaatattgctaaaacggaagcgatcgatccgacaacggtaaagattaccctcaaacagccgttcagtgcgtttattaatattcttgcccatccggcgaccgcgatgattagtccggcagcgctggaaaaatatggcaaggagattggtttttatccggtgggaaccggaccgtatgaactggatacctggaatcagaccgattttgtgaaggtgaaaaaattcgcgggttactggcagccaggattgcccaaactggacagcataacctggcgtccggtggcggataacaacacccgcgcggcaatgctgcaaaccggtgaagcgcagtttgctttccccattccttacgagcaggccacactgctggagaaaaacaaaaatatcgagttgatggccagtccgagtattatgcagcgttatatcagtatgaacgtgacgcaaaagccgttcgataacccgaaggtccgtgaggcgctgaattacgccattaaccgtccggcgctggtgaaagttgcctttgcgggctatgcaacgccagctactggtgtggtaccgccaagtatcgcctacgcgcaaagttataaaccgtggccttacgatccagtgaaagcgcgcgaattactgaaagaggcgggatatcccaacggtttcagtaccacgctgtggagcagtcataaccacagcaccgcgcagaaagtgctgcaatttacccagcagcagttagcgcaggtcgggattaaagcccaggtgactgcgatggatgccggacagcgggcggcagaagttgaaggtaaagggcaaaaagagagcggcgtgcggatgttctacactggctggagcgctagtaccggcgaagcggactgggcactaagcccgctgtttgccagccagaactggccaccgacgctgtttaataccgcgttttacagcaataaacaggtggatgacttcctggctcaggcactgaaaactaatgatccggcggaaaagacccgcttatataaggcggcgcaggatatcatctggcaagaaagcccgtggatcccgctggtggtagaaaaactggtgagcgcacacagtaaaaacctgaccggtttttggatcatgccagacaccggcttcagctttgaagacgcggatttgcaataagcaacgcagggagtggaatgcttaattacgttatcaaacgcttactggggttgattccgacgctgtttatcgtcagcgtgctggtgtttttatttgtccatatgctgcccggcgatccggcgcgattgattgccgggcccgaagctgatgcgcaggttatagaactggtgcgtcagcagctggggttggatcagccgctgtatcaccagttctggcactatatcagcaatgctgtgcagggggattttggcctgagcatggtgagccgtcgtccggttgccgatgagattgccagccgctttatgccaacgctgtggctgaccataaccagtatggtctgggcggttatatttggtatggcggcgggaattatcgccgccgtctggcgtaaccgttggccggatcgattgagtatgaccattgcggtgagcgggatcagctttccggcatttgctctggggatgcttttaattcaggtattctccgttgaactgggctggctgcctaccgtgggagcagacagttggcagcactacattttaccctccctgacgctcggcgcggcagtggccgccgtgatggcgcgctttacccgcgcgagctttgtcgatgttttaagcgaagattatatgcgtaccgcgagggcgaaaggggtgagcgaaacctgggttgtcctcaaacacgggctacgtaacgcgatgatcccggtagtgaccatgatgggcttacagtttggctttttgctcggtggttccatcgttgtggagaaagttttcaactggccgggacttggacgcttactcgttgactccgtagaaatgcgtgattacccggtgattcaggcggaaattctgcttttcagcctggaatttattcttatcaacttagtggtggatgtgctttacgccgccattaacccggctatcaggtacaagtaaggatgcgactatttaactggcgacgtcaggcggtgttaaacgccatgccactggtcaaacctgaccaggtacgtacaccgtggcatgaattctggcgacgatttcgccgtcagcatatggcgatgaccgccgcattattcgttattttattgattgtggtggccatttttgcacgctggatcgctccctatgacgccgaaaattattttgattatgacaatctgaataacggaccttctttgcagcactggtttggcgtcgatagtctggggcgtgacattttcagccgtgtcctggttggtgcgcaaatcagcctggcggcgggcgtgtttgccgtgtttatcggtgcggcgatcgggacgttgctgggcttgctcgctggatattatgaaggctggtgggatcggctgatcatgcgcatttgcgatgtgctgtttgccttcccgggtattttactggcgatcgctgttgttgcggtgttgggaagcggcattgctaacgtgattattgcagtcgccattttttccatccccgcgtttgcccgcctggtgcgcggcaacacgctggtgttgaaacagcaaacctttattgagagtgcacgcagtattggtgccagcgatatgaccgttttgttgcgtcatatcctgcctgggaccgtctcttctatcgtggtgtttttcaccatgcgcattggtaccagcattatctctgccgccagcctcagttttctcggcctcggtgcgcagccgccgacaccagagtggggagcaatgctcaatgaggctcgagcggatatggttatcgcgccgcatgtcgctgtttttccggccctggctatttttctgaccgtactggcgttcaatttgttgggcgatggtttacgcgatgcgctggatccgaaaattaaaggataattacgtttgaatattgcttgaaagggtaatcacctcacaggaaattattgccctaagcaagtgttgtaactttctgctgattttgtagaatcgggtaatttggttaaaaagccgcagcaagggacaatttttgcagcggcacagcgttcagatagttattttgttaaatgtattaacatgctgagtttatacgaaaagataaagataaggctgataattttatttttattggcagcactgagttttattggtctttttttcatcattaactatcaactggtaagcgagcgcgcggtaaaacgtgccgatagccgctttgaacttattcagaaaaacgttggctatttctttaaagatattgaacgtagcgccctgacattaaaggacagtctgtatttattaaaaaatacagaggagattcaacgcgccgtgattcttaaaatggaaatgatgccatttttagacagcgtgggactggtacttgatgataataaatattatctttttagccggagggcgaatgataaaatcgttgtttatcatcaggaacaagtaaatggaccgcttgtcgacgagagtgggcgggttatttttgccgattttaacccaagcaaacgaccgtggagcgtggctagtgatgactctaacaacagctggaatccggcatacaattgctttgatcgtccgggtaaaaaatgtatctcttttacgctacacatcaacggcaaagatcacgatttgttagcggtggataaaattcatgtcgatttaaactggcgatatctgaacgagtatcttgatcaaatcagcgctaatgatgaagttctatttttgaaacaaggccatgagatcattgccaagaatcaactcgctcgtgaaaaactgattatttataatagcgaaggtaattataatattattgattctgtcgatactgaatatatcgaaaaaacaagtgcggtgccaaacaacgcattattcgaaatctatttttattatcctggcggtaatttattgaacgcaagtgataaacttttttatctgccgtttgcgttcattattatcgtattgctggtggtttatttaatgaccactcgtgtgttccgtcggcaattttctgaaatgacagagctggttaatacgctggcgtttttgcctgacagtacggatcaaatcgaggctctgaaaattcgtgaaggcgatgcgaaagagattatcagcatcaaaaatagcatcgcggaaatgaaagatgccgaaattgaacggagtaataaattgctcagtctgatctcttacgatcaggaaagtggttttattaaaaatatggcgattattgagtctaacaataatcagtatctggctgtggggatcatcaaactgtgtggtctggaagccgtggaagcggtgtttggtgttgatgagcgcaataaaatcgtcaggaaattgtgtcagcgaattgccgagaaatatgcgcaatgctgcgatatcgtgacattcaatgccgatctctatttacttctgtgtcgggaaaatgtacagacatttacccgtaaaatagcgatggtaaacgattttgacagcagctttggctaccgcaatctgcgcatccataagtctgccatttgtgaacctttgcagggggaaaacgcctggagttacgcagaaaaactgaaactggcgatttccagtatccgtgaccatatgttcagtgagtttattttctgtgatgacgcgaaactcaacgaaatagaagagaatatctggattgcgcgtaatattcgccatgcaatggaaattggcgaactattcctcgtctatcaaccgatcgttgatattaacacccgcgccattctgggcgcggaggcgttgtgccgttgggtgtctgcggagcgggggatcattagtccgctgaagttcattaccattgctgaagatatcgggtttatcaatgagctgggttatcagattattaaaacggcaatgggtgaattcagacattttagtcagcgtgcgagcctgaaggatgatttcttactgcatattaatgttagcccctggcagttaaacgaaccacactttcatgagcgttttaccaccatcatgaaagaaaatggcctgaaggcgaacagcctctgtgttgagatcactgaaaccgtgatcgagcgaattaatgaacatttttatctcaatattgaacaactgcgtaaacaaggggtacggataagcattgatgactttggcaccggtttgagtaacctgaaacgtttttatgaaattaatccagacagcataaaggtggacagccaattcaccggcgatattttcggtactgcgggaaaaattgtgcgcattattttcgacctggcacgctataaccggatcccggtgattgcggaaggcgtagagagcgaagacgttgcgcgcgaattaatcaaattaggatgtgttcaggctcaggggtatctgtaccagaaacccatgccattctccgcctgggataaaagtggaaaattagtaaaagagtaatttacgtatgtccagaatcaataagttcgtacttacagtcagtctgctgatttttatcatgattagtgcagttgcctgcgggatctacactcaaatggtaaaggaacgggtgtatagcctgaaacagtccgttattgatactgcttttgcggtggcaaatattgctgaatatcggcgtagcgtggcaattgatcttatcaacacgctaaatcccacggaggaacagctgttggttggtttgcgcacagcttacgccgacagcgtttccccctcttatttgtacgatgtcggtccttatctgatttccagtgacgaatgtattcaggtaaaggagttcgagaaaaattattgtgcagatattatgcaggttgtgaagtatcgacatgtcaaaaatacagggtttatctcttttgacggtaaaaccttcgtctattacctctatccggtaactcacaatcgtagtctgatatttttgcttggtctggagcgtttttctttactgagtaaaagcctggcgatggacagcgagaacctgatgttctctctatttaagaacggtaaaccggtgaccggtgatgaatataatgctaaaaacgccatcttcaccgttagcgaagcgatggagcacttcgcctatttgccgaccggattgtatgtatttgcgtataaaaaagatgtttatttgcgggtttgtacattgattattttctttgccgcattggtggcagtgataagcggtgccagttgcctctatctggtacgcagagtgattaatcgtggtattgtggagaaagaagccatcattaataaccattttgaacgcgtactggatggcgggcttttctttagcgctgccgatgtcaaaaaactctacagtatgtataacagcgcgttcctggacgacctgaccaaagcaatgggcagaaaatcctttgacgaagatttaaaagcgctgccggaaaaaggcggttatttgtgcctgtttgacgtcgataaattcaaaaacattaacgacaccttcggtcatttgctgggcgatgaagtgttgatgaaagtggtgaaaatccttaaaagtcagatcccggtagataaaggtaaagtctaccgcttcggcggtgacgaatttgcggtgatttatacgggtggaacgctggaagagttgctaagcattctaaaagaaatcgttcatttccaggtgggaagcattaatttaagtaccagtatcggtgtagcacatagtaatgaatgtcctaccgtcgaacgcttgaaaatgctggcggatgagcggctgtataagagtaagaaaaacggcagggcacagattagctggcagtaatcattattcgcaggccggacaaatgattttgcccggcctgaattaattaaacccggctaccccacaaatcgtactcatcggcgtgctcgactttcacacgcaggatatcacccggcttaacgttggtttcaccattgagataaaccgcgccgtcgatttccggtgcatctgccatgctgcgaccaatcgcgccttcttcgtccacttcgtcgataatcaccagaatttcacggcccactttctcttgcaggcgctcggcggaaatctgctgctgcagctgcatgaaacggttccagcgttcttctttaacttcttccggaacctggtcaggcagggcattggcgtctgcaccttcaaccgggctgtatttaaagcagccaacgcgatccagacgcgcttctttcaggaagtcgagtagcatctggaaatcttcttctgtctcgccagggaagccgacaataaaggtactgcgtagggtcagttccgggcagatttcgcgccactgtttgatgcgcgccagttggcgatctacagaacccggacgcttcatcagtttgagaatgcgcgggctggcgtgctgcaacggaatgtccagatacggcaggattttgccttctgccatcagtgggatgacgtcgtccacatgcggataagggtaaacgtagtgcagacgtgtccagatccccagtttgcttaactgttcgcacaggctgaccatgctggtttttaccggctcgccgttgtggaagccagtacgatgtttaacatcaacgccataggcggaagtatcctggctgatcaccagaatctctttaacgcccgcatctaccagacgtttcgcttcacttaacacttcgccaatcggacggctcaccaggtcgccgcgcatagacggaataatgcagaaggtgcagcggtgattacagccttcagaaattttcagataggcataatgacgcggcgtcagtttcacaccttgttctggcaccaggctcaggaatgggttgtgtttcggttttggcacgtagtgatgaacgtgctccagaacctgctcatagctatgaggcccggtgatttccagcactttcgggtggacttcgcggatctgatcttcttttgcccccagacaaccggtcacaataaccttgccgttttcattcaacgcttcaccaatggcttccagactttcttgtaccgcgctgtcaataaagccgcaggtgttgacgatcaccatgtccgcatcgtcatagctcggtaccacgtcataaccttcagtgcggagttcggtgagaatacgctcactatcaacaaggtttttcggacagccaagggaaacaaagccgattttcggctggggagttactttgctcatagcttaaaaaatattcagttacaggaaaggtcagggcagggattctacagagttctggataaaatttgtatcgcaatctcattcgctggcggaggcgaaggaaatgtaaattttgttaattcggcgtgaagaattgatcctggacagcattttgctcaaaaaatagccatactatttaattgcaacaaggctgggaagaggaggatcgaagtatgttcgttgacagacagcgaatcgatctgctgaaccggttgatcgacgcacgcgttgacctcgccgcatacgtgcaactgaggaaggcaaaaggatacatgtccgtcagcgaaagcaatcatctacgagataacttttttaaactgaatcgcgaactgcacgataaaagcctgcggttgaatcttcatctggatcaggaagagtggagtgctcttcatcatgctgaagaagcattagcgacagccgcagtatgtttgatgagtgggcaccatgattgcccgactgttattaccgtcaacgccgataagcttgaaaattgtctgatgagcttaacgctgagtatccagagcctgcagaagcacgccatgcttgagaaggcctgaaaactaagggggagaaagcgtctcccccttcatgtttaagtttttgtaaaaatgaatttgttatctcctccactgactacgctttaagccagagtcaatccggaggcgttatgcatcgacaatcctttttccttgtgccccttatttgtctttcttccgctctctgggcggctcctgcaacggtaaatgtcgaagtactgcaagacaaactcgaccatccctgggcactggcctttttacccgataatcacggtatgttaatcactctgcgcggcggcgagttgcgtcactggcaagcaggaaaaggattatctgcgccgctttccggagttccggacgtttgggcgcacgggcagggcggcctgctggacgtggttttagcgcctgattttgctcagtctcgccgcatctggttaagttattccgaagttggcgatgatggcaaagccggaactgctgtgggttatggccgcttaagtgatgatctcagtaaagtgaccgacttccgcaccgtctttcgccagatgccaaaactgtctaccggcaaccattttggcgggcggctggtattcgacggtaaaggttatctttttattgctctgggcgaaaacaatcagcgcccgacggcgcaggatctggataaattacagggcaaactggtgcgtctgaccgaccagggcgaaatcccggatgataatccttttataaaggaatccggtgcgcgcgccgagatctggtcttatggcattcgtaatccgcaaggaatggcgatgaatccgtggagtaatgcactgtggctgaatgaacatggcccgcgcggtggtgatgaaattaatatcccgcaaaaaggcaaaaactacggctggccgctggcaacctggggaatcaactatagtggctttaagataccggaagcgaaaggggagatcgtcgccgggaccgagcaacctgttttttactggaaagatagccccgctgtgagcggcatggccttctataacagcgataaattcccccagtggcagcaaaaattatttattggcgcgctgaaagataaagatgtcattgtgatgagcgtcaacggcgacaaagtgacagaagatggccgtattttaacggacagagggcagcgaattcgtgatgttcgcactggacccgacggttatttatacgttctcaccgacgagtccagtggggaattacttaaagttagcccacgcaattaactaacgggaatcatcaccactttgcgcactgcggggcgttcagtgagttgctgataccagcgttgcagatttggacgcggtgtccaggtcaggccaacgttaaacaaattgtagatgaacggtgcgatagcgatatcgcccacaccaaactcgtcgccagagaaccattttacttttgccagttccgcatcgagcagggcaaacagggcgtcgcactctttgcaactggcatcaatggcggcctgatcgcgctcttccggtggtgttctgactaatcccatcaggatcccgcgatgagcattactgagcgtctggtttgcccagtccatccatttttccgcttccgcacgacgtgccggactgtcgatccacaggcgtttttgcccgtactgtgccgccagatagcggacaatggcgttactttcccaaagaatgagatcactttcgtcgtcacgcaacaacggcaccagcccgttagggttcatcgccagaaaatcagcatcgtgatttatcccaaactcacggcccgcgagaatttgctcataaggtagttccagttcttcgagcgtcagcaatactttttttacgttagtactattattccgaccccacagcgtaatcatactcaccccttttccgacaggcagccacaggctgaacaggactccgatggtgaagtaaagttaacttttaagcaacagctggcaaaaaaatgacaccagaagcagcgaagcggcaggatattgcataaactttaaaaactttaccaacttacggtttctttaagtttgtgtgtgcgttattaatcaccaaacttatcatacggcgatataacgtattttttttgaatggatactcgggtggcatttatgacgcaatactcctctctccttcgtggtcttgcagcgggttctgcatttttattcctttttgccccaacggcattcgcggcggaacaaaccgttgaagcgccgagcgtggatgcgcgtgcatggattttaatggattacgccagcggtaaagtgctggcagaaggcaatgcggatgagaaactggatcccgcgagcctgactaaaatcatgaccagctatgtggttgggcaggcgcttaaggccgataagattaaactcaccgatatggtgacggtcggtaaagatgcctgggcgacgggaaatccggcactgcgtggtagtagcgtaatgttcctcaaaccgggcgatcaggttagcgtggcagacttgaacaaaggtgtgattatccagtccggtaatgacgcctgtattgcgctggctgattacgttgccgggagccaggagagttttattggtctgatgaatggttatgccaaaaaactgggtctgaccaacactaccttccagacggtgcacggcctggatgcgccggggcagttcagcaccgcgcgcgatatggcattgctgggtaaagcattgatccacgatgtgccggaagagtacgccattcataaagagaaagagttcaccttcaacaaaattcgtcagcctaaccgtaaccgtctgctgtggagcagcaatctgaatgttgatggcatgaagacaggaaccacggcaggcgcgggatataatctggttgctagcgctacccagggcgatatgcgtttaatctccgtagtgttgggggcgaaaaccgaccgtatccgttttaatgagtctgagaaattattgacctggggtttccgcttctttgaaaccgtgacgccaattaaacctgatgccacctttgtgactcagcgcgtctggtttggtgataagagcgaagtgaatctcggggcaggtgaagcgggcagtgtgaccataccgcgtgggcagctgaaaaacctgaaagcgagttatacgttaacggaaccgcagcttaccgcaccgctgaaaaaaggtcaggttgtcgggaccattgatttccagcttaacggtaaatccattgagcagcgtccgctgatcgtgatggaaaatgtggaagagggcggattctttggtcgggtgtgggatttcgtgatgatgaaattccatcagtggttcggcagctggttctcttaatcttctgataaccggatggcgcgaaacgtcatccggttatacgtcattaatacatcaacttaatgcgctgcgtctgcgcgtacttcacatactcatcttccgggcaacaatcgctcaccacaatatcaaagcgtttcaggtcacccatgcgcgccggacgcaccttgccaaatttactgtggtcgacaaccagcacatgcttttgcgccatgctcatggcccagtgttttaccggcaactcttcaagattaaaacaggtagcgcctttactgacatgcacgcccgccgcagaataaaaagcgatatccgggcaaaaattattcagcgtttgctgaaaatcgatgggtttgaaaatggcgttgctggcgtgaaattcaccaccgcaaagaaacgcgcggcaatggggtttctctttcagcgccagaaaggtatttaggctataacaaacggcggtaaaagggatttcattatcaatcgcttcaataatccacggcgtggtggtgccacagtcaaaaaagagggtctgatcgggttctaccagcgtcgcagccagttttgccgcccggcgtttttcttccaccaggcgggatttttgatcgcttaacaggtaatggctggcactgcgcggttccagaacaatatagccgccgagcaaaacgacgggcgcactgtggttgttcagatcgcgacgaatcgtcatctcgctaaccccaagcagggcggcggcgtctttaagatgtaacttatcgctgcgttttaattcttgcagcagctgcccgatacgctcttcgcgacgtgtttccataatccctctgaatagttattgaagcgagccgctcaatactacactttttagcagagatcagtcacgcacccagcctttgcggatcggtaatgcaaaacagacgcgataccagctttgcagacgttgatagagtttatgccccatcgcttgccagataatctgggcactaaggcagccaatcatacctgccagcaatccaccgagcatatccagcggccagtggacgccaagataaacgcggctccaggcaatgacgacggccagcaccattaaaagactgccggaccacaggcgatgccagcataaaaatgccagtgcaaaggtgaaaatcaccgtaccgtgatcgcttgggaaactgtcatccgccgcatgatgcaggaagttatagccgatattttcgacaaagggtcggtcgtgcggaaaaagatgtcccatcgtccaggacacaaacaggctgaccgccagcgcgatagcgatttttatcaccagttgccgttgtgctgtaagcccccacaaccaaagtaccacggccagcaacggcaccacggtaatcaaatctttagcaataaaaatcgccaagctgatcatccacggagcgctgtctggcgtcgcgttaataagagagaatagagagagattcaaattttccagcataacttcccgacgcaaagtgattaaaagggagccaatacaggcaagtcgttgagaataaagtgcaggttaaactgggtaaagcggcatcgtcttatttccctcaagcggcctgtttacggtgggtgattgtaacgggcataggttaaataaaacttaaagaaagcgtagctatactcgtaataatgtaagaatgtgcttaaccgtggtttcagctacaaaattcgctttctcgttagctgcgcttttattaaactctgcgcgattattattggcgaagaaattgcatgcaaaataaattagcttccggtgccaggcttggacgtcaggcgttacttttccctctctgtctggtgctttacgaatttagtacctatatcggcaacgatatgattcaacccggtatgttggccgtggtggaacaatatcaggcgggcattgattgggttcctactagcatgaccgcgtatctggcgggcgggatgtttttacaatggctgctggggccgctgagcgatcgtattggtcgccgtccggtgatgctggcgggagtggtgtggtttatcgtcacctgtctggcaatattgctggcgcaaaacattgaacaattcaccctgttgcgcttcttgcagggcataagcctctgtttcattggcgctgtgggatacgccgcaattcaggaatccttcgaagaggcggtttgtatcaagatcaccgcgctgatggcgaacgtggcgctgattgctccgctacttggtccgctggtgggcgcggcgtggatccatgtgctgccctgggaggggatgtttgttttgtttgccgcattggcagcgatctcctttttcggtctgcaacgagccatgcctgaaaccgccacgcgtataggcgagaaactgagtctgaaagaactcggtcgtgactataagctggtgctgaagaacggccgctttgtggcgggggcgctggcgctgggattcgttagtctgccgttgctggcgtggatcgcccagagcccgattatcatcattaccggcgagcagttgagcagctatgaatatggcttgctgcaagtgcctattttcggggcgttaattgcgggtaacttgctgttagcgcgtctgaccagccgccgcaccgtacgtagcctgattattatgggcggctggccgattatgattggtctattggtcgctgctgcggcaacggttatcagtagccacgcgtatttatggatgactgccgggttaagtatttatgctttcggtattggtctggcgaatgcgggactggtgcgattaaccctgtttgccagcgatatgagtaaaggtacggtttctgccgcgatgggaatgctgcaaatgctgatctttaccgttggtattgaaatcagcaaacatgcctggctgaacgggggcaacggactgtttaatctcttcaaccttgtcaacggaattttgtggctgagcctgatggttatctttttaaaagataaacagatgggaaattctcacgaagggtaaaaaaatgcctgactgctttgtgcgatcaggcattctcgaattaatggtgatggtcgtcaatctggtgttcgataaccatcccttcacctacgctggcaagatggcgaacataaggatgcgggcggtaagccggagctggcgcaggagccacatagacggtttgcggcacagtcgcgacgctgaccgcttgtggaacgctgacactatcaggaaccacaaccactttgtatccactcggcacatcgacggtgacactttgcgccatcgccacaccagtaaagcccattaaaagcgcgcccaacagtagacaatttttcataatcatttcgcctgaaataatgcagcgggttaatttccgcgaattatgcagccttcattcaggcattgtgttgccgggcgtgctgccggttttattggtcaaatggcgcttcgtgtttaagaactttatcgatcacatccagtacgccttcacggttattggagcctgcgcggtattttgccgctgcgacgaccgcgctaccggcattttccattgcaaaactaaagcctgcctgacgcagcatctcaatatcgttaccgccatcgccaaagaccaccacttcgctgtcgtctattccccataatttctgcagttggcgaaggccattggctttatgtacgccggggataatcagatcgatgctgccgttgccggtgtggacgctcaccataatatcgccgatggcctcatgtaatgctttttgtacttgtggaatcagttcatcggaaagattcaggccaaacttaaagaagatatcctctaagttgtcaaagttatcgacgtattccagacggtgataatacatttccgccaccgttttcatggcatcgtcatattttttgagtgtataggcactattttttccgcaggcaataatttccacttccgggcgcgtcagcaaatgttccacgacagtagcaaacgcatccttgcttagctcgccattaaaaacatctttgccttcgctcactacccagccgccgttttcagccacaaaggcaatttcattagcaatttcagggaagaaagagatcaactgataatattgattcccgctggcgactacaaagcgaattccttgtgctttcatttgctgatactgagccataaaccgctcacggttataggttttttgatcgcttaagaaagtaccatccatgtctaccgcaattaatttaatgctcatcaactattctccatcgccgtctgcgttttggtatcgggtttggcgacggctttcgcgacaatagccgcgagaataaccagcgccagtacaaccagcattgcactacgtaatccataatgttcgccgagatagcccagcagcggcggcccgacgaggaaagccagataaccggtcgttgctaccacactgacgcgggttggtgcatcggggccggtatcgctggcggcagaaatggtcagcgggaagcccaggctggcacccagtccccagagtacaacagacaccccagcgacccaggcgctatcgacaaaaataatcagcccaatacccaacgcccccattagtgcactggcccgaaccacggcaacgcgactgtaacggtcgatgaaccaaccgccggtgaagcgtccaacggtcatccccagggtaaaaccggcataaatcaggctgccggaagtagggctaaaaccgtgaccgtcaaccattaataagggtaaccagtcgttggcagaaccttcggcaaaggccatcgccagcaccacaacacctatcagcagcaactggatatcgcgataaaaaggtacgcctttttcgccatgctgggtgccatcggcagcatttttgcccgtaccgtcagggattgcctgaatggcgatataaataggtgcgatacctaccagcgccgccaataaaatgtgcaccgttgccggaacgccaaaggccgtcagtgccatcccgacacctgcgcctgccagcgtgcccaggctataaaaaccgtgcatcatcggcaaaaccgtcttattcatttctcgctcaacggcagcaccttcaacgtttatcgccacttccgcagaaccaaaacttgccccaaagacgccgagaccaacggcaaagagcagggggcttgtcagccagagtgccagacttaatatcatcatcccgatcaatgcgcaggacatcgtgaccaggatgacattacgtgtcccaaagcgtttcactaaccacgcgctgcagagaataccgctcatgctaccgatgctcagaccaaagagaacaccgcccatttcagcgatgctgacagagagaatatcgcggatagcaggcgtacgggttgcccaggacgccattaacaggcctggcaaaaagaagaacataaacagcgcccaggttcggcgtttcaatgcattacgactagaatttacggtcatagatcacgtcaaaataagaagagggaagacaacattagcaaggttgtgtacatttgtacacaattgcagagagaggaaatgacatgcgtcgcgctaacgatccgcaacggcgagaaaaaattatccaggccacgctggaggcggtgaaactttacggaatacatgctgttacgcaccgcaaaattgctacccttgccggggtaccgttgggaagcatgacctactattttagtggaattgatgagttgttactggaggcgttcagcagttttactgagatcatgtcccggcaatatcaggcattttttagcgatgttagtgatgctccgggcgcatgccaggctatcaccgatatgatctacagcagtcaggttgcaacgccggataacatggagctgatgtaccagctctacgcgctggctagccgaaaaccgctattaaaaacggtaatgcaaaactggatgcagcgcagtcagcaaacgctcgaacaatggtttgaacccggaaccgcccgcgcgcttgatgcgtttattgaggggatgacgctgcattttgtcaccgaccgtaagccgctaagccgcgaggagattttgaggatggttgagagggttgcagggtaatagataagttttagataacaaaaaacccatcaaccttgaaccgaaatggcggggttgatgggctccacaaaatggggacatcaaagaaaagcagtggcactaattaagactgatgccctgcggaaaagttctgcggttgtgcaaaaaaatttcattttcagggcaacttcagttttatcctaatcctggccataccatgacgatgattgtccctgccagcgtcagcaggacgttggcgattgcataggtgcccgcatagcccagcgccgggatgttactgcgagctgtatcactgatgatctccattgccggcgcgcaggtacgtgcgcccatcattgcgccgaacaacagcgcgcggttcattcgcaatacataagcaccgaacaagaaacagataaccacgggcaccagactgacaatcaatccggcaatcaacatctgaccgccaatcgcgcccaggccgttattaataccgctaccggcgctcagaccaacgcctgccataaacaccatcaagccgaactctttcaccatgcttaatgcaccctgcggaatgtaaccgaaggtcgggtggttagcacgcataaagcccagcataattccggcgaataacaacccggcagcgttccccatgccgaaactgaatgtgctgaactggaaggtgatcatcccgatcatcagcccaataacaaagaaggcgcagaatgccagcaggtcagtgacctggctgtgaatgctgataaagccgatgcgatcggcgatggtttttacgcggcgggcatcgccgctgacttgtaaaacgtcacctttgttaagcacgacgttgtcatctatcggcatctcaatctggctacgaatgacgcggttaaggaagcaaccgtgatcggtcaacttcagttgtgcgagacgtttacctacagcgttatggtttttaacgaccacttcttcagtgacgatacgcatgtcgagaaggtcacgatcgaaaacttctttaccgttacggaagctgggatcgagtcgggcatgggcgtcgggatagcctaccaacgctatttcatcgcccatttgtagcacggcatcaccgtctggatttgccagaatcccgttacgtcgaatacgttcaatgtagcagccggtttgtcgataaatacccagttcacgcagatttttgccgtcggtccaggccaccagttccgggccgacgcgataggcgcggatcaccggtaaataaaccttacggttggcatcagtgtccaggccacgttcgcgggcgatttgctgggcgctggtctgtaagtcctgatgctgcaatttcggcaagtaacgcgcaccaacaatcaaactcaccagaccgattaaataggttaaggcatacccgaggctcagattatccagtgccagactgagctgcctgctttccatgccggaatgacgcagtgtatcgccagcaccgaccagaaccggtgtgctcgtcatagagcctgctaacataccggccgtcaggccaatatcccagccaaacagcttacctaaccctaaggcgatcaccagcgcactgccaaccatcaccagtgctaacattaggtaatttttcccatcgcgaaaaaaaatggaaaaaaagttcggtccggcttcgaccccgacgcagaaaataaacagcataaagccaagattaagcgcatcggtgttaatgctgaaatgttgttggcctaataacaggcttacgactaaaacgccaatggaattacccagttggatgctaccaagtcgtaactttccgagacatagcccaagcgcgaggaccacaaataataacagaatgtaattcccatttaacaattcggcgacgtttatattcacggaggctaacttcttgtttactagtaagctgttgaaagaaatggtaatttacgataatgttttttaccagaattcagggcgcagattcattcagcgcacctaaacgatagtaaagtaacaatatattttactagtgtaatcacattaggtatcaacggctatatgaattgcgttggcctatattagcatggaatgcgaagcggctttatcttactgaacgccacactggcgaaaaatgtgttcgatagacgcagtgtcaggaggaacgagtgaaacataaacaacgttgggcgggggcaatctgctgttttgtcctcttcattgtggtgtgcctttttctggcgacgcacatgaaaggcgcttttcgggctgccgggcatcctgaaatcggcttgctatttttcattcttcctggagcagtcgccagcttctttagtcagcgtagagaagtcctgaaacctctgtttggcgcaatgctggcggcaccctgtagcatgctcattatgcggctgttttttagtccgacgcgcagtttctggcaagagctggcatggttactaagcgcggtgttctggtgtgcgctgggggcactgtgtttcttatttatcagtagtttgtttaaaccacagcacagaaaaaatcagtaaagccctcaacgcgagggcttgtcagacgatcaggcgtccagattttctttcacccatgcagcaaaatcggtatagccgccgatatgttgctgatcgacaaaaatctgcggcacggtttctacgggtttacctgccttttgttgtagatcttctttagtgatcccttccgcacgaatatctacatactgatactgaaaatcatcgcgttcattgctcaatttctcagccagatcttttgcacgcacacagtaagggcaaccgctacgaccaaaaataacggtttgcattatttctctcctcatagatttatgcctgtaatgatcacgctaaaatgtattcgctgaaagtaggtttaacctgttgcattaattgctaaaagctataactgttaaacacaatacagtgaaaagttttagactgaaggctcactttgcagagggaagcgtatgcgcgcgatcggtaaattgcctaaaggcgtgttgatactggaatttatcggaatgatgctactggcggtggcgctgctgagcgtaagcgactccctgagcctgcctgagccattttctcggccagaagtgcagattctgatgatttttctcggtgttttgctcatgcttcccgctgcggtggtggttattcttcaggtggcaaaacgtcttgccccacagctgatgaaccgtccaccgcaatatagtcgtagtgaaagagaaaaagataatgacgccaaccattgaacttatttgtggccatcgctccattcgccatttcactgatgaacccatttccgaagcgcagcgtgaggcgattattaacagcgcccgtgcgacgtccagttccagttttttgcagtgcagtagcattattcgcattaccgacaaagcgttacgtgaagaactggtgacgctgaccggcgggcaaaaacacgtagcgcaagcggcggagttctgggtgttctgtgccgactttaaccgccatttacagatctgtccggatgctcagctcggcctggcggaacaactgttgctcggtgtcgttgatacggcaatgatggcgcagaatgcattaatcgcagcggaaagcctgggattgggcggggtatatatcggcggcctgcgcaataatattgaagcggtgacgaaactgcttaaattaccgcagcatgttctgccgctgtttgggctgtgccttggctggcctgcggataatccggatcttaagccgcgtttaccggcctccattttggtgcatgaaaacagctatcaaccgctggataaaggcgcactggcgcagtatgacgagcaactggcggaatattacctcacccgtggcagcaataatcgccgggatacctggagcgatcatatccgccgaacaatcattaaagaaagccgcccatttattctggattatttgcacaaacagggttgggcgacgcgctaaaaccgccacgtcgatgtatgatacgcgggcttttgaccaggtctgacagagaggtgcagggtgaaaattgccatattgtcccgggatggaacgctctatagctgtaagcggctgcgtgaagccgctatacagcgcggtcacctggttgaaattcttgatccgctttcttgctacatgaacataaatcctgcggcgtcttctattcactacaaaggccgcaagttaccccattttgacgcagtgatcccgcgtattggcaccgccattaccttttatgggacggcggcactgcgccagttcgagatgctggggagctatccgctcaatgagagcgtcgccattgcccgggcgcgtgacaaattgcgttccatgcaactgctggcgcgtcagggcatcgacctgcctgtcacgggcattgcgcatagcccggatgataccagcgatttaatcgacatggtcggtggtgcgccgctggtggtcaagttggttgaaggcacgcagggaattggcgtcgtgctggcggagacgcgtcaggcggcggaaagcgtgattgacgctttccgcggtctgaacgcgcatattctggtgcaggaatatatcaaagaggcgcaagggtgcgatatccgctgtctggttgttggcgatgaagtggtcgctgcgattgaacggcgggcgaaagagggcgattttcgttccaatttgcatcgtggcggcgcggcaagcgtcgccagtatcacaccacaggagcgtgaaatcgcgataaaagccgcgcgaacgatggcgctggacgttgctggtgtggatattctgcgtgctaatcgcgggccgttggtgatggaggtgaatgcgagcccggggctggaaggaatagaaaaaaccaccggtatcgacatcgcgggtaaaatgatccgctggatcgaacgccacgctacgacagaatattgcctgaaaacgggtggttaatcgcaatcacattactgatcatggttttgcctgcgctttttgcgtaagctgtgccggtctttttatcgaaagaggttgtacaaaattatgacaagcctggtcgttcctggtctggatacgctgcgtcaatggctcgatgacctggggatgagtttttttgaatgtgataactgtcaggctctgcatctgccccatatgcagaatttcgacggtgtctttgatgccaaaatcgatctgatcgataacacgatcctgttttctgccatggcggaagtccgacctagtgccgtattgccgctggcggcggatttatctgccatcaatgccagtagcctgaccgtgaaagcatttcttgatatgcaggatgataatctgccaaagctggtggtttgccagtctttatccgttatgcagggcgtaacctatgagcagtttgcatggttcgtgcgtcagagcgaagagcagattagcatggtcattcttgaagctaatgcccatcaactgctgttaccgactgatgatgaagggcaaaacaacgttaccgaaaactatttcctccactgataactcctttcgagcacgcagtcgctggtgcagtggctgcgcgctgcaaaattatctgctgtttttaaccttttcttaaagattatttcacttctcttgtgtcgatttggctttatcacatagagcaaatatgcataaaaatttgttaaataccgttttttaatccgagctatagtctcaaaccctggctaaagttattcttgcgatgcttttatatagcgagcagtgctggccgggagaaagttctcttttcttacaccgcgccgataaaaaatatgcacgtttattgcatatctttcagtgtgacaacttttgttcgtttgttaacgaactttcagaaggaaagagatatgaccgccttaaataaaaaatggctaagcggtctggttgcgggtgctctgatggccgtctctgtcggcacgctcgcggctgaacaaaaaacactccacatttataactggtctgattatatcgccccggacacggtggccaattttgaaaaagaaaccggtattaaagtcgtctacgatgttttcgactctaacgaagtactggaaggcaaattaatggccgggagtaccggctttgatctggtggttccatctgccagctttctggagcgccagttgactgcgggagttttccagccgctggacaaaagcaaattgccggagtggaagaatctcgacccggaactgctgaagctggtcgccaaacacgatcccgacaataaatttgctatgccctatatgtgggcgacgaccgggattggctataacgttgataaagttaaagcggtgctgggcgaaaacgcgcccgtcgatagctgggacttgatcctcaaacctgaaaatctggaaaaactgaaaagctgcggtgtctctttcctggatgcgccagaagaagtttttgctaccgtgttgaattatctcggcaaagatcccaacagcactaaagcggatgattacaccggaccggcaacagatctgctgttaaagctgcgcccgaacattcgttatttccatagttctcaatacattaacgacctggcaaacggcgatatttgcgtcgctatcggctgggcaggtgatgtctggcaggcgagtaaccgcgcgaaggaagcgaagaatggcgtgaatgtcagcttcagcattccaaaagaaggggcgatggcgttctttgatgtattcgccatgcctgcggatgccaaaaacaaagacgaagcctatcagttcctgaattacctgctgcgcccggatgtagtagcgcatatttccgaccatgtgttctatgccaacgccaataaagcagccacgccgctggtgagtgcggaagtccgtgagaacccaggtatttatccgcctgcggatgttcgtgcgaagctgttcactctgaaagtgcaggatccgaaaatcgaccgtgtgcgcacccgcgcgtggaccaaagtgaagagcggaaaataatccgcagtcgtagatgccggaggggcgcaccacacccgccggcaattcgcaccattatggtgcgcttgcacacattcaatgccggagagcagccgtgaatgacgctatccctcgcccgcaggcgaaaacccgtaaggcgctgacgccgctattagaaatccgcaacctgaccaaatcctacgatggtcaacatgcggtggatgatgtcagcctgaccatctacaaaggtgaaatcttcgcgctgctgggcgcatccggctgtggcaagtccacgctgctgcgtatgctggcaggtttcgaacaaccttctgccggacagataatgcttgatggcgtcgatttgagtcaggttccgccttacctgcgccccatcaatatgatgtttcagtcttacgcgctgtttccgcatatgaccgtggaacagaacatcgcttttggcctgaaacaggacaaactaccgaaagcggaaattgccagccgggtcaatgagatgctcggcctggtgcatatgcaggagttcgccaaacgcaaaccgcatcagctttccggtggtcagcgacaacgtgtggccctggcccgaagccttgcgaagcgcccgaaactattactgctcgatgagccgatgggcgcgctggataaaaagctgcgtgacaggatgcagcttgaagtggtggatattctggagcgcgtcggtgtgacttgtgtgatggtcacccacgatcaggaagaggcgatgaccatggcggggcgcatcgccattatgaatcgtgggaaatttgtccagattggcgaaccggaagagatctacgagcatccgactacccgctatagcgccgaatttattggcagcgtaaacgtctttgaaggcgtactcaaagagcgtcaggaagatggcctggtgcttgatagcccggggctggtgcatccactgaaagtcgacgcggatgccagcgtggtcgataacgtgccggtacatgtggcgctgcgcccggaaaaaatcatgctttgcgaagagccgcccgccaatggttgtaacttcgcggtgggggaggtgatacacattgcctatctcggcgatcttagcgtgcatcacgttcgtctgaaaagtgggcagatgattagcgcccagctacaaaacgcccatcgtcatcgtaaagggttaccgacctggggcgacgaagtgcgtttgtgctgggaagtggacagctgtgtggtgctgacggtttaaggagcaaagatgagtacacttgaacctgctgcccagagcaaaccgccgggcggatttaagctgtggttgagccagctgcaaatgaagcatgggcgcaaactggtcattgcgttgccatatatctggttgatcttgctgtttctgctgccatttctgattgtctttaaaataagcctggcggagatggcgcgcgctattccaccttataccgaactgatggagtgggctgacgggcaactgtccatcactcttaatctcggtaattttctgcaactgaccgacgatccgctctatttcgatgcttatctccagagcctacaggtggctgcgattagcacattttgctgtttactgatcggctatccgctggcgtgggcggtggcgcacagtaagcctagcacccgtaatattttattactactggtgatcctgccgagctggaccagctttctgatccgcgtttatgcctggatgggaatattaaaaaacaacggtgtgctgaataattttctgctgtggctgggggttatcgatcaaccgctgaccattctgcataccaatctggccgtttatatcggcattgtttacgcttacgtgccgtttatggtactgccgatttataccgcgttgattcgtattgattatagcctggtggaagcagcgctggatctcggtgcacgaccgctgaaaacgttctttactgtgatcgtgccgctgactaaaggtgggattattgccggaagcatgctggtgtttatcccggctgtgggcgagtttgtgatcccggaactgctcggtggcccggacagcatcatgatcgggcgcgtgctatggcaagagtttttcaataaccgcgactggccggtggccagcgcggtagcgatcatcatgttgctgctgctaattgtgccgataatgtggttccacaaacaccagcaaaaaagcgtgggagaacacggatgaataatttaccggtagttcgtagcccctggcggattgtgattttgctgctgggctttacctttctctacgcgccaatgctgatgctggttatctatagctttaacagcagcaagctggtgacggtgtgggccggctggagtacgcgctggtatggtgagttattgcgcgatgacgcgatgatgagtgcggttggtttaagtctgacaattgcggcctgtgcggcgacggcggcggcgatcctcggaactattgcggcggtggtgctggtgcgctttggcaggtttcgcggaagtaatggctttgcctttatgatcaccgcgccgctggtaatgccagatgtcatcacgggcttgagcctgttgttattattcgtcgcgcttgctcatgccattggctggcctgcggaccgcggtatgctcaccatctggctggcgcatgtcactttttgtacggcttatgtggcggtcgttatttctagtagattgcgggaactggatcgcagcatagaagaagcagcgatggatctcggtgcgacgccgctgaaagtgtttttcgtcattacgctaccgatgatcatgcccgcgatcatttctggctggttactggcttttactttgagccttgatgatctggtgatcgccagctttgtttccgggccgggagccaccacgttaccgatgctggtcttttccagcgtgcggatgggggtgaatccggaaatcaacgccctggcaacattgatcctcggcgcggtcggaattgtcggatttatcgcctggtatctgatggctcgcgcagaaaaacagcggatacgcgacatccagcgtgcaagacgtggctgaagacactaaaatttgccaacctggctacataatgccgcgcatgtcgcggcattgttttcatggaagacgaaacgttgggattttttaagaaaacatctagttctcatgctcgcctgaatgtgcctgcgctggtgcaggtggcggcgctcgccattattatgatccgtggcctcgacgtgctgatgattttcaatacgctgggcgtgcgcggtattggcgagttcattcatcgcagcgtacaaacctggagtttaacgctggtctttttaagcagtctggtgctggttttcattgagatctggtgtgcgtttagtctggtgaaagggcgtcgctgggcgcgctggctatatctgctgacacaaatcaccgccgcaagttacttgtgggcggctagcctggggtacggttatccggagctgttcagcattcccggtgaaagtaaacgtgaaatcttccatagcctgatgctgcagaagctgccggatatgctcatcctgatgctgctgttcgttcccagcaccagtcggcggttcttccagttgcaataatgtgtataatcgtcgcccctgatgatgtgaaggtcaatgtatgcagtgcgcactttacgacgcgggtcgctgtcgttcctgtcagtggataatgcagccgattccagagcaactctccgctaaaaccgccgatcttaaaaatctgctcgccgactttccggttgaggaatggtgcgcgccggtgagtggcccggaacaagggtttcgtaataaagccaaaatggtggtgagtggtagcgttgaaaaaccactgctcggtatgctgcatcgcgatggcacaccagaagacctttgtgactgcccgctttatcctgccagttttgcgcccgtttttgcggcgctaaaaccgtttatcgcccgagcggggttaacgccctacaacgtggcgcgtaagcgtggcgaactgaaatacattctgctgactgaaagccagagtgatggaggcatgatgctgcgctttgtactgcgttctgataccaagctggcgcaactgcgtaaggcgctgccgtggttacacgaacaactaccgcagctgaaagttattaccgtcaatattcagccggtacatatggcgattatggaaggggagacggagatctacctgaccgaacaacaggcactggcggagcgttttaatgacgtaccgctgtggatccgtccgcaaagtttcttccagactaatccggcggtcgccagccagttgtacgccaccgcgcgcgactgggtacgacagctgccggttaaacatatgtgggatctgttctgcggtgtggggggctttggtttacactgcgcgacgcctgacatgcagttaaccgggatcgaaattgcaagtgaggccattgcctgtgcaaagcagagtgccgctgaactgggcttaacgcgtttgcaatttcaggcgctggactccactcagtttgccaccgctcagggggatgtgccggagctggtgctggttaacccgccgcgccgcggcattggtaaaccgctgtgtgattatctcagtacgatggcaccgcgttttatcatctactccagctgtaacgcccaaactatggcgaaagatatccgcgaactgcctgggtttcgtattgaacgggtgcagcttttcgatatgttcccgcataccgcgcactatgaagtgctgacgctgctggtgaagcaataaaaaagccgcatgtgcggcttcagattgctgacaaagtgcgcgttgtttatgccggatgcggcgtaaacgccttatccggcctacaaaagcgtgcaaattcaatacattgcatgggccatgtaggcctgataagcgtagcgcatcaggcaattttacctttgtcatcagtctcaagccgcggttgcggctttctgaatcttactgtgggaaccactggtcactgattttttgataagtaccgtcagctttaattgctgccagcgcgttattcagtttttccagcagggctttgttatccggacgtacagcgatgcccaggccggtgccaaaatattgcggatcggtcactttctcagtagcaacaccaagttgtggattggttttcagccattcgtttaccaccgctgtgtcaccaaataccccatcaatacgaccatttttcagatcgataaaggcattctgataactgtcataagagacagttttcacttccgggtgctgatcctgaatatatttctggtgcgtagtaccgttttccatcccaatacgtttgcctttcagatcggcaaacgttttgtaggtatcttttttggcaatcacgacggcactgttttcatagtagggcgtggtaaagcttacctgtttgctacgctccggggtgatatccataccggagattacggcgtcatattttctgaatttcagggacgggatcaggctgtcgaacgcgtgattagtaaaagtacattctgcctgcatttgtttgcacaaggcttttgccagatcgatatcaaagccgacaatctcattattagcacctatagattcaaagggtggataggtggcactaacgccaaaattgattttctctgcggcagaagcaccgaaagtaaaggaagcaagtaaagcggcaagaactaactttttcatgatggaactcccgtctgtcaatcttatgatttttggccgtgtctgcggcatgggataacaatgccatcaagtgaatttatatgcaataaacatgattaaataatttaaatgaaataaaaaagacggacaacttagtgggttgtccgtcttcattataagaatttatgcactatgtaggccggataaggcgtccccgccgcatccggcacaggcaccgtgctgatgtctgatgcgacgctggcgcgtcttatcagacctacaaaaccccccggcgaatgtacgcagccacattaatttcgccgttcgaatgccagcgctttgcgctcgatcagacgcatcatcagcgtcagcaggccgttaacgaccaggtaaataatccctgccgcaccgaacaccattacatcgtaggtgcgtccgtacaacaactggctgtatcccatcacttccatcagcgtaatggtgtatgccagagaggtacttttgaataccagcaccacttcgttggaataagaagagaggctgcgtttaaaggcatacggcagcaggatcgccagcgtatcttttttgctcattcccagggcgctacaggactgccactgaccttccgggatcgcacgaattgcaccgtaaaacagctgcgtggtatacgccgcactattcaggctcaacgcaatcagcgcacataaccacggttcactcaacaaatgccacagtgccggatactcctgcaaagtcggaaactggcccggcccgtaataaatcaggaagatctgcaccagcagcggcgtaccggtaaacagcgtgatataaccccgcaccagccacaccagcaccggcgttttcagcgtcaggatgatggtaaaaatcaatgccagaatcagtgccacaatcaggctggcaacggttagcgtcaggctggtgtgtagccctttcatcagttcgggtaaatactcaaacattagctgggcctccgctcaaaacgtgtcgcgcgcaggtcaatgcgtttgagaatgtactgactgagcagggtgatcaccaggtaaatcgccgccgccacaatgtaccaggtaaatggttcctgggtacgagtagcgatgctttttgtttgcagcattaaatcattcacactaatcaaactgaccagcgcggtatctttcagcagcaccagccactggttaccgaggccaggcagcgcatgacgccacatctgcggcatcaccagacggaaaaagatagcgcttttgctcagccccagcgcctgaccagactcccactgacccaccggcaccgctttcaacgcgccccgaagcgtttggctggcataggcggcatacagcagactcagagcgatgacaccacaaaggaacgggctaacgtcgaagttctcaatgtccatctgcactgggatctgcacgaacccaagattgatagtgaagccatcgctaagcgtcagcagcagctggctggagccaaaatagataaacagcaccaccagaatttctggcaggccacgcagaatggttaccagcgcactacctgcccacgcgacaggacgccattttgcgctctcccataccgcaaagaacatcgccagcgccagcccgacaatcaatgcacaaacggcaaggccgacggtcatcccggcggcgcttgctaaaggaaaaaattcattcatcaggaattacttctggaaccatttgttgtagatggtttcgtaagtgccatctttcttcactttttccagcgcagtgttgagtttctgctgcagctcagtgttgccctgacgtaccgcgatgccgaggccagtgccgaagtaatctttatcggtcactttgtcgcccaccgccgccagtttcgggttatctttcagccactcagtgaccactgcggtgtcaccgaagacgccgtcgatacgcccgttttgcagatccagttttgcgttctggtagctgtcatacggaacggtagtgatttccgggtgcttatccataatgaatttctggtgtgtcgtcccgttctgtacgccgacttttttgcctttcagctgatcaacactggtgtatttgccttgctgacccacaaacagggcagagttgtcatagtacggggtggtaaacagcacctgcttttcacgctccggagtgatatccatgcccgccatcacggcttctacgcgacggaatttcaggcttgggatcaggctgtcaaacgcctggttagagaaagtgcaggttgcatcaatctctttacacagcgcttgtgccaggtcgacgtcaaaaccaacgatctggttgtttgcatcaatgctttcaaacggaggataggaggcttcggtagcaaaacgaatggtttcggcagctgtggcggaaagactaaaacctgcaattaacgcggcaatcagaacttttttcattgttgttatcccgaatcttagtgagagagatagtttttaaatgcttcggtttgcggctcggtaaagcagctcgcgtcgccttgttctacgatatgaccattttccatatacaccactcggctggcggttttacgcgccacttcaacttcgtgggtgacgatcacctgggtaatattcgtttctgccagctcacgaatgatgctgacgatttgtgccgtaatttccgggtccagtgcggcggtcggttcatcgaacagcagtacctgcggttccatcatcaacgcacgggcaatagcaacacgctgctgctgaccaccagaaagatgcagcgggtaacgatcgctataaggtttgagacgcagacgttccagcagtttttctgcacgggccagcgcctgatctttactcaaccccagtacacggcagggcgcttcaatcaggttttgctgcacggtcagatgcggccacaggttgtattgctgaaacaccatgccaacgttacgacgcaaatcgcgaatcgctttgtcagagggtgttttggtgaaatcgaaatggttgcctgcaatgttgagcgtaccggagcgcggcatctcaagcagattgagtacacgcagcaggctgcttttacccgcgccgctggggccaagtaacaccagcgtttcgccctgtgggcaatccagcgtgatatcgaacagcgcctgatgcgcgccgtagaagcaattaatgccgtttaattgaatactcattgacactcgtatactggcagtctgatagctattgaggtcgaagatagtacctttgacagaataattatgcaatatttctgctttaaaagttaaaagcaaagcgcattattcaataaacatagcacaaaataacgggggcggtggtcggcgagcataaatgtcggcattcctcacgaaatgccggacaatttacggggtttattggttgatcaaggcgttagcgattctcgatggactgacggagcgtacccgccgtggcatgaacgctaccgcctaagtaacgcacatcgtcgatgacccaacactggccttcctgaatcattaacacttcatcctgccaaccctggtcaccctgtttgagatccacgcgcaatggaatgttacgggcatcacgattagggatagtgcttgcactggcaacgtgggcgctatctggcaaggtggttcgactggagaatggatcgttggtcagtagttcccgatggttattatcccgggaggcatcgctaagcagtgtcgccagtttgtcgctcagataagggcgcaaggcggtgatgtcgttgctgcggtgcaaaatgcggtagtcataaaattgctgggccacgttatccgggcctccttcaacgcaaggaccactgcgtgtgccgttatctttataagctggagtgactgtggtgcaggcactgaggagcagtgcgcaggggataagcattgtcaatttgctgtagcgcataatgatttccttataagcgatcgctctgaaagcgttctacgataataatgatatcctttcaataatagcgtatcagtctgataatgcttttgagatcgaaggcttagcaaacaaggagatcgatcatgcaattttctacaaccccaactctggaaggccagaccatcgttgaatattgcggtgtggtgaccggcgaagcgattttaggtgccaatattttccgtgatttctttgccggtatccgcgatatcgttggcggacgttccggtgcgtatgaaaaagaactgcgtaaagcacgggagatcgcctttgaggaattaggctcccaggcgcgggcgctgggggccgatgccgtcgtcggtattgatatcgactacgaaacggtcgggcaaaacggcagtatgctgatggttagcgtcagcggtacggcggtgaaaacgcgtcgatgagaagattcttctggctggtcgctgccgctctgttattggcagggtgtgcaggcgaaaaaggcattgtcgagaaagagggatatcagcttgatacccgacgccaggcgcaggcggcgtatccgcgcattaaagtgctggtgatccactacaccgcagatgattttgatagcagcctggcgacactgaccgataagcaggtcagcagccattatctggtccctgcggtaccaccgcgatacaacggtaaaccgcgcatctggcaactggtgccggaacaagaactggcctggcatgcggggattagcgcctggcgcggggcaacgcgccttaacgacacctctattggcattgagctggaaaaccgtggctggcaaaaaagcgccggagtgaaatattttgccccgtttgaaccggcacagattcaggcgcttattccactggcgaaagatattattgcccgttatcacatcaagccggaaaacgtagtggcacatgcggatatcgcaccgcagcgcaaagacgatccggggccattatttccctggcagcaactggcgcagcaggggattggtgcctggccggatgcgcagcgggttaacttttaccttgccgggcgcgcgccgcacacaccggtagataccgcgagtttgctggagcttttggcgcgctacggttatgacgttaaacctgatatgacaccgcgcgagcagcggcgcgtgattatggcattccagatgcatttccgcccgacgttatataacggcgaagcggatgcagaaactcaggcgattgccgaagcattgctggagaaatacgggcaggattaacgcggcagttttccgtggtcgcgtagccaggcggcagttttctcgataccttcatccagggtgatgaccggctgataacctaactcttcctgcgcacgcgtaatatccagcgtaaagtcaaaattcaacttggagacgccgtagtgggtcagcggcggctcttttgcactcttgcggcctaaacgctccatgctgcgggcgatcatatccagcatcgggtaggggacggaacgaatacgacagtcaatattcaactcgtcgatcagcttctgcacgatgctgcgcagtgtgcgatgctcgccgttggtgatgttgtacacacgcccggaaggtagcttatcgcaggcttcctggcttgccagccacattgcgtgcacggcattttcatagtaggtcatatcgaccagcgcactgccgccatgcggtaacagaatactgccgtagtggtgcatcatatgcgccagacggggaataaagactttatcgtgcggtccgaacagactttgtgggcgcagaatagtaaagcgcgtttgtggattcgcctggctaagcatattgatcacttcttcgctggctgctttgctgcgggcaaactcgttggcgaagcggtgagggcgaaaatcttctttaatatcgcgatggtggtgataatcgaagtacagggagggggaagagatatgaataaagttacgcacaccccaggcgacagcccattcacccaggcggcgagtggcgcgaacgttagccagatcgaaagcctgttgtgtcccccagggactggtaaagctggagcagtgccacagcgtatcaatgcccgcgagcatcactttagcttgactactaaccagctcggtcagatccgccggaacaaactctgcgcccattttttccagcaatttgcccattgcctcgttgcgaccggtcgctcgcacgctgatgcctttctggcataaaaactctaccgcgtttcgacctaagccgctggtggcgccggtaaccagtaccttcatatcaatccactgttgttgagaaaataacgtgcgcattcttccgtgatttcccccatgatgcaatgggaaacatgaaagaataacgcaggttttgtcgattaatctgtgctttgttctgccagtctggcgatttgttttgccattccgcgaaaaataaacagatgcgcggggatcatcaataaccagtaaaacagccccggcataccgtgcggatgccagaaagcgcggacatcgatagtacgatagtcgcctttatcttccaggctaaaacacagtcgtcccagccccggcgctttcatgccaaataacaacgtaagttgtttttccggttcaacgacaatcactttccagctatccaccgcatcgccagtctgtaaatattcgcgctccgggcggcctttcgccagcttatgaccgatcgcgcggtccatcaacgcccgtgtctgccacaaaatattgccaaagaaataacgctctttaccgccgatttggttcactacctgccataaagcagcaaggctggcggacgttttaacggtaaaccccgcctgtttggcaaaataaccgtactccggtcgccagcgggcaaaggcctgagcgtcgtagccccagtcgctggagttgaccagtttttcctcctctttcaacgtgctacgtaccgcgtcatcgaaagcgatcagccgttgtgggatgagtgcacgtagcgcggtatcatccgccagcagatcgtgtttcagcccctgaatcaacgccctggcggtggtgggcggtacggaagtaatcacattgagaaaccacacgctaatccagcgggtggggagggggatggggatcaaccagcggcgcttaccgctcaccgccataaaatgttcaaactgttgctgataactgagcacctctggtccggcggcttcgaagatgcggtgttcgctggccggatgatctaacaacgcaaccagatagtgcagcaagttttccagcgcaatgggcgtggtgcgactacgaacccagcgcggaggcgttaagactggcaggttgtagaccatatcgcgcatgacttcgaacgccgcggaacctgcgccaacgataattccggcccgcagttcggtcacgggtacattcgcttcacgcagaatgtccgccgtagcctgacgagcacgcagatgatcgctctgctcatgtggcggggcctgcaagctactaagaaagattaattgcttaactggtacttcacgtagcgcatcgcggacgttgagagccacctggcgctcctgagcgataaaatcgccgccttcgcccatgctgtgcaccagaaaatagaccgtatcgatatcctgcaacagggccggtaggttatccggccagctgagatcgactttatggcaactgacgtttgccagttgcagctttgcaagcctgtcgacatgacgtgccgccgccaggatctgatgcccttgctggctgagtgtgcgcaccagatgctgaccaatgtagccactggcaccgagaactaaaatgcgttgcggcacgtctctctccttaacgcgccaggaatgcacgccagtgggcggcgacttccgccagttgttcgcggctgacgtcaagatgcgtcaccaggcggacaatcgggctggcgttaatcagcacgtttctcgctttcatgtattcgcctaacgcggcagcattttcttccccgacgcgaacaaacagcatattggtgtcctgacgcatcacatccgcgcctgcttcacgcagctgctccgccatccaggcagcgttgtcgtggtcttcctgcaagcgcgcaacgttatttttcagggcatatatcccggcggcagccagaatgccggactggcgcatcccgccacctgtcattttccgccagcgaatggcacgtttaatgtaatcacgattaccgacgagtaaactaccgactggcgtcccaagacctttgctcaggcaaatggtgaagctatcacaatattgcgtgatctctttcagttcgcagccgtaagccaccacggcattaaagatgcgcgcaccgtcaacatgcagcgccagattgcgctcgcgggtaaattcccatgcttctttcaggtattcccgcggcaacactttgccgttgtgggtgttttccagactgagtaatttggtgcgggcgaaatggatatcgtcgggtttgattttcatcgccactttatccagcggtagcgtgccgtcggcagccgcgtctatgggttgcggttgaatactgcccagcaccgccgcgccaccggcttcaaacagatagttatgcgcggcctgaccgacaatatactcttcgccgcgttcgcagtgactgagcagagcgaccaggttggcctgagtgccggtaggcagaaaaatggcggcttctttaccggaaagctctgctgcgtagtcctgcagagcattaacggtagggtcgtctccgtaaacgtcgtccccaaccggggcggccatcatcgcttcgagcatggcgcggcttggtcgggtaacggtatcactgcgtaaatcaatcatggcatgtccttattatgacgggaaatgccaccctttttaccttagccagtttgttttcgccagttcgatcacttcatcaccgcgtccgctgatgattgcgcgcagcatatacaggctgaaacctttggcctgttcgagtttgatctgcggtggaatggctaactcttctttggcgaccaccacatccaccaacaccggaccgtcgatggagaaggcgcgttgcagggcttcatcaacttcagacgctttttctacacggatacccgtaatgccgcacgcttcggcaatgcgggcaaagtttgtgtcgtgtagttcggtgccgtcagtcaaatagccaccagctttcatctccatcgccacaaagcccagcacgctgttgttaaagacgacaattttcactggcagtttcatctgcactacactgaggaaatcgcccatcaacatgctaaaaccgccatcgccgcacatggcgaccacctgacgttctggctctgtcgcctgcgcacccagcgcctgcggcatggcgttagccatgctaccgtggttaaagctacctaacaggcgacgcttgccgttcatttttagataacgtgccgcccacaccgttggcgtaccaacgtcacaggtgaaaatagcgtcatcggcggcaaaatgactaatttgctgcgccagatattgcgggtgaatggctttctcgctcggtttagctaaatcgtccagccctttgcgggcgtcgcggtaatcttccagcgctttatccagaaacttgcgatcggctttttcttccaccaatggaagcaatgcacgcagagtgctcttgatatcgccgaccagtgccatatccaccttgctgtgagcgccgatgctggctgggttgatatcaatctgaatgattttggcatcggtcgggtagaaggcgcggtagggaaattgcgtgccgagtagcactaacgtgtcggcgttcatcatggtatggaaaccactgctgaagccgattaacccggtcattccaacatcatacggattatcgtattcgacatgttctttaccgcgcagggcatgaacaataggcgctttaattttcccggcaaactcaactaactctttatgcgcccccgcgcagccgctgccacacatcagggcgatattgctggaataacgcagcagttgcgccagtttgcgtaactcttcttcttccggcgtcacgactggttgtggcgcatgataccagtgcatggttgccccttctggcgcaggttttaacgccacgtcgcctggtaacacgacaacgctaacgccacggttaagcaccgctttgcgcatggcaatcgccagtacttgtgggatctgctccgggctggaaaccagctcgcaatagtgactacattcgcggaatagctcttgtgggtgggtttcctggaaatagccgctgccaatttcgctggagggaatatgagcggcaatcgccagtaccggaacgtgattgcggtggcaatcgaacaggccgttgattaagtgcaggttgccggggccgcagcttccggcgcagaccgccagttctccgctaagttgtgcttcagcgccagcggcaaaggccgccacttcttcgtggcgggtggacatccactcgatggtgcccatgcgattaagactgtcactaagaccgttcagagagtcgcctgtgactccccagatgcgtttcacccctgcgctttcgagtgttttggcgatataagctgcaaccgtttgtttcatggttctccatctcctgaatgtgataacggtaacaagtttagttcatctgacggagggggaagggatgggagagaaaggaggcactaacggttaaatagcccgatgaaaggaatatcatcgggcataaggcgattatgcgagaaccaaatccccctgcggatggcaggagcaggccagtacgtaaccttcagcgatttcggcgtcggtcagcgtcattgtgctgctcaccgtatattcaccggaaaccacttttgtcttacagcagccgcaaacacccgcacggcaggcagcgacaaccggaacgttattgctttccagcgcctccagtagcgtggtgccaaccggggcgtaaaattctcgtgccggttgcagtttggtgaatttcagaccgctggtcgccgcttctgctactggggtgaagaatttctctttaaagaaacgcgtcacgccgagcgctttcacttcctgctctacccaatccatatacggagccgggccgcaggtcatcacggtacgactagctaagtcaggtacacctgccagcagttcgcgagtgagacgaccagcgataaagccttcggtaacgttattttctgccaccagcgttaccggatagttacgccactcatcggcgaaaataacatcctgcggcgtacgcacgttgtagatcacccgcacatcggcctgtggacggttcttcgcaagccagcgacgcatgctcataatcggcgtgacgccgcagcctgccgccagcaacaggaatttatcttctgctttatcgtcgcaggtaaattcccccatcgcgtcgctaagccagagataatcaccgcgttttacatcgcgcgtcagccactgggagccgacaccgtcatcaatccgccgcacggtcagggtgatatattcactcacgcctggcgtggaggaaatggtgtaagcacgcagcgtttccgcactgtttcgcacgctgaccagtgcatattgcccggcgcgatatgggtagtaatcgtggcaaatcagggaaatcgtccacacatccggcgtttcttgcgtaatgtgatgaacctgcatccgccacgggcattgattcgttggcatcgtcatcgacaaactccttacgcgctcaacagttgcttcatgtcttcttcaacagtggtgatagaacgcaggccgaatttctcgttcagcaccgccagcaggtctggtgtcaggaaaccaggtgcagtcgggccggtgacgatatttttcacgcccagagaaagcagcgtcagcagaatgacgatcgctttctgttcaaaccaggagagcaccaggctcagcggcagatcgttgacaccgcagcccagtttctctgccagagtgacagccagaataatcgcactgtaagcatcgttacattgacctgcatctaccagacgcggcagaccttcgatatcgccaaactcaagtttgttaaagcgatatttaccacaggcgagggtcaggatcaggcagtcatccggcacgctggtggcgaaatcggtgaagtagtggcgctcgccgcgtgcgccgtcacagccaccaagcaggaagatatgacgcagtttttcacggctcaccagatcaatcagcgtatcagcagcgccaagcagcgtctggcgaccaaaacccacggtgataaggtgcggaatttcgctgtacgggaagcctgccatctgttgcgcctgggtgataaccgcagagaaatcatcaccgtccagatgacgcacgccaggccagccaacaatgctgcgggtccagatacgatcgtcataagcgcctacggttgggtcgatgatgcagttgctggtcatcacgatggggccagggaaacgagcgaactccacttgctgattctgccagccgctgccgtagttaccgaccagatgcttgaatttacgcagctccgggtagccatgcgcaggcagcatttcgccgtgggtgtagacattaacgcccgtgccttcggtctgttccagcaggttgtagagatctttgagatcgtgaccggaaatcagaatgcatttacccgccgtcgctttgacgttgacctgggttggcgtcgggtgaccgtatttaccggtttcgcctgcatccagaatgctcatcactttgaagttcatctggccgatttccatactacactcaagaagcgcgttcatatcggcaggccaggtccccagccacgccatgattttatggtactgggcataaatatcgttgtcgtattgaccgagaacatgcgcgtgttccatataggccgccgcacctttcaggccatacaggcacagcagacgcaggccgagaatgttttcgccaatcgccgctttatctttgttaggggtaaattctgctgcctgacgttgcagctcgccgagatcgtcgctcaccagttgcaggtcagccatcgggttatcgacgcgcgcgttggcatctacagccaggcattgcgctttcagcgcctcgcgcagggcaatcgcttcacgagcgtagccgacaatacgcggagaatcgaagttaacgttggtcagggtactgaaaaaggcacgtggcgcgaagctgtcaacatcgtggttgatgatgccgtattcacgcgcttttaccgcccaggcagaaagcccttgcagcgccgcgatgagtaaatcctgaaggtcagaagtttccgccgttttaccacacatcccctgcgcgtaactgcagccgtttcctgccggagtacggatagtttgttcacattgcacacaaaacatgatcacaccttttaaagttatatttaatatacatgtttaaggttaagacgcttaacgcggggataaaagggatttttcatgcaactttaagggagattgatttagcgcaattttggcggcagggatctaccgccagagaggtattacgcagagaaaaaggcgatgaggatcggcactaacaggctaagaataaaaccgtgaacaattgccgccgggaccatatccagcccgccagtacgttgaagaacgggcagggtgaaatccatacttgtggcaccgcataagcccagtgcagtagagcggctgcggcgaatcagcccagggatcaacataatagcaatcagttcacgggccagatcattaaaaaacgccgcgctcccgattaccggaccaaaagattcggtcaataaaataccggaaagagaataccagccgaaaccggaggccattgccagcgcggtattgatggggagatcaagaataaaggcgttaattaaaccaccaattaaactactgacaaccaccaccacggcgacaatcattccccggcgattaaggacaatctgctttaaggtcatgccattattgcgcaactgaataccaacgaggaaaagtagcaaaattaacgtgtattcactggcttcggtcgcgtgttgtaagaaagccagtccacttagaccaatggcaaaaccaatcactactacgccgcacagttttaggctctccagcgccatcgcaatacggctcgggagtttttcttgctgatggtggttgcgccacggcaggcctcgctccagccacatcagggcggcaatattacacagtaaaataacggtaatactgacggcagaataatgcagaatcgccaacaggttactggcgaggttatcgagaaacgccagactgatacccataaaaaagagaataaggtaaaccatccagcttaatagctgattaataacttttaacgcagcttgttggcgaagcggaatgaggtaacccacaatcaggggaaccagaatgattaacagcccagaaaacatgaaaacccagtccttgcaaagatgaagtcgaaatgcgcgatgacacactactgaaagcggaaggacgagtaaagttgcaattaaaaggaaatgttatgcataaggagcagtagagtattcgttttcatttaaagatattcttgcgctttaattacaaactgcaccgatgttggtggcgtcaaaatcgccgaggcgttccctgaaggccggggcagcccacatggatgtgggctgagggcgcgttttacagggatgttacctcgcgcccgacccggtagccgtaagggataagtcgagggcaccgcgcagcggcgattttgttcgccagagcccgggggtgcagggggcggcggcgattggccgccccctgcgcgctccttgcgccagtggcaatatgttgcttagctcatgaaaggagcgcaacaagatgatgaatcaacatataacaacatcttaaaaaaaggcctgacattacgccaggccttctgcgttaattaatcacgcttttccagcagggtccggtaaatcagaccaccgataatgccgccgacaattggcaccacccagaagaaccacagttgttctaatgcccagccgccctggaagatagcaaccgcggtgctgcgcgccgggttaacagaagtgttagtcaccggaatactaattaagtgaatcagggttaaggccagaccaatagcgatcggcgcaaaacctgccggcgcgaatttgtcggttgcgccgtggatcaccaacaggaaacctgcactcaataccagttcaactaccagcgcggaaagcatggaataaccgcctggactatgctcgccataaccgttagaagcaaaaccgctggctgccgcgtcaaaacccgttttaccactggcaattaaatacagcagcgccgctgcaacaataccgccgacaacctgggcaattacgtagccaacgacttcttttgccggaaaacgtccgccagcccataaaccaatagtgaccgccgggttaaaatgaccaccagaaatatgaccaacagcaaaggccatcgtcagaacggtcagaccgaacgccaacgccacgccggcaaaaccaatgcctaattccgggaagcctgcggccagtacagcactaccacagccaccaaaaacaagccagaaagtaccaaaacattcagctgctaattttctgaacatatccaccacaattaaaaattgaccctgtgaaaaatatggtcgttttatagggtcgtcgtaaaaaagtgacgacggaaataatgcgcggctattttaaaaacgaaggcgagtcattcaccagataaataaatccagtaaatttgatttagggcaacagcgggttgccccatatagtcatttgtctgattgacagtgtagtgcacgcaaaagatttaatcctttaggcgtaataaaaaataatttatcatgctaattatttgattttgttgtttttgcagacttatcagcaagagggagtataacgcgattattcgctcatttttcagacatttgccatgcttaaatgtgatgtcatcacgtattagcaaggcctttcccgttatactgccagcgtaaaggataagtcacatatttctggaggggatatgattcttgagcgcgttgaaattgtgggttttcgcggtatcaaccgtttgagcttgatgctggaacaaaacaacgtcctgattggggagaacgcgtggggtaaatccagcttgctggacgccttaactctgctgctaagcccagaaagtgatctctaccattttgagcgcgacgatttctggttcccgccgggagatatcaacgggcgagaacatcatctgcatattattttgaccttccgcgaaagcctgccaggccgacatcgggttcgccgttatcggccgctggaagcgtgctggacgccatgcaccgatggctatcaccgtattttttatcgtctggaaggggagagtgcggaagacggcagcgtgatgacactgcgcagttttctcgataaagacggacatccgattgatgtcgaggatattaacgatcaggcacgccatctggtgcgtttaatgccggtgctgcgcttgcgtgatgcccgttttatgcgccgtattcgtaacggcacggtgccaaatgtccctaatgtggaagtcaccgcgcgccagctcgatttcctcgcccgtgagttatccagtcatccgcaaaatctctctgatgggcagattcgtcagggactttccgcaatggtacagctgcttgagcattatttctctgagcagggggccggacaggcgcgatatcgtttaatgcggcggcgagccagcaatgagcaacgaagctggcgctatctggatatcatcaaccggatgattgaccgacctggtgggcgcagctatcgggttattttgctcggcctatttgctactttgttgcaggcaaaaggcacattgcgactggataaagacgcccgtccattgttgctgatcgaagatccagaaacccgtttacaccccattatgcttagtgttgcctggcatctgttgaatcttctgccattgcagcgcattgccaccaccaacagcggtgagttgcttagcttaacgccggtagagcatgtttgccgactggtacgtgagtccagccgcgttgccgcctggcgtctggggccgagtggcttgagtaccgaagatagccgacgcatatcctttcacattcgttttaaccgtccgagtagcctgtttgcacgctgctggttgctggtggaaggggaaacggaaacctgggttatcaatgaactggcgcgtcagtgcggacatcattttgatgccgaagggatcaaggtcattgagtttgcccagtccgggctaaagccactggttaaatttgcccgccgaatggggattgaatggcatgtactggtcgatggcgatgaagcagggaagaaatatgccgctacggtacgcagcctgttgaataacgatcgggaagccgaacgagaacatttaacggcgttaccggcgctggatatggaacattttatgtatcgccagggattttccgatgtgttccaccgcatggcgcaaatcccggaaaatgtaccgatgaatctacgcaaaattatcagcaaagcgatccatcgctcttccaaacccgatcttgccattgaagtggcaatggaggcaggacgtcgtggtgtggactccgtaccgacgctgctgaaaaaaatgttcagtcgcgtgctgtggctggcgcgcggtcgcgcggattaaccgcgaaacatcgtggccatttgtggctgaatagcgtcgagcatctcatagcgccgacggtattcagcccgttttttactggcgatttcggcaatctcttttcgtgctatctgtgctggaaggcggtaatggcgttcagcatcacatacgccgccaacgctttcccagaaagcgttgtaatcagcgtggatcttgccttctttatcgcgataacgcaggctgcggtaaatatgcgtttcattgctgacggcaataatctgctctacctgcaaacgttgggcaaacagacaggccgcttccatcacgaggcgtttgggaaatagcccgtggcaggctttcgtcgcattctggatttcctgatgtggaatttcccattttgcgccttgcagtccgccaataaacatcgttcttttcccctgatattcacacagggtaaacgtgatctctgccagaggaataccttcgctgttgcggaacaggattgtgctgtcaccttctttatccatactgatcatcatggtcagctcaagcgtgaactgctcgccgtttttgccttccagcttcgccagttgcagcccgggggtattcaaatataagctgaattcttccgcgctcatacattcgcggagtaacgcataatggtaacgtaacgcctccagcaattgcttacggctaagattcgccgcaaggtaagggcgatgcagacgcacaggcagtcgcggctggcgcgttaacaatacattgagattaggccagtgggaaagttcgttcatccactcaacgcttaaacgcggcataatcaagctgcgcagcaaaaatttctggcgaaaactacggcgatgccagaatttacccggccgacactgtccacgtgccagactaagaaaaagactcaggctgctgagagattcagatggcgtaaaggtccgttcagttagctggctcatattcatgaaatcaatggttatacatggcgtgcttttcaccattgcgtatcttaaccaaacatcaatagtgtgattactaacgtaaattttagggttttgttgatatttcgttgaagttaatgacccggattggcatatggagtattcagaaaatttatgaaaaagcggaaaaccgtgaagaagcgttacgttattgcgctggtgatagtcatcgccggactgattacgttatggagaattcttaacgcacccgtgccgacttatcagacgctgattgtgcgccccggtgatttacagcaaagcgtgctggcgaccggaaagctggacgcgctgcgtaaggttgatgtgggcgcgcaggtcagcggtcagttgaaaactctgagcgtggcgattggcgataaagtaaaaaaagaccagcttttaggggttattgatcctgaacaggctgaaaaccagattaaggaggtcgaagcaacgctgatggagctacgtgcgcagcggcagcaggcggaagcggagctgaaactggcgcgggtgacgtattcccgtcagcaacgtctggcacaaacgaaggctgttagtcagcaggatctcgacaccgccgcgacggagatggctgtgaaacaggcgcaaattggcaccattgacgcgcaaatcaagcgcaatcaggcttctctcgatacggctaaaaccaatctcgattacactcgcatcgttgccccgatggccggggaagtcacgcaaatcaccactctgcaaggccagacggtgattgccgcacaacaagcaccgaacattctgacgctggcagatatgagcgccatgctggtaaaagcgcaggtttctgaagcggatgtaatccacctgaagccggggcaaaaagcctggtttacggtgcttggcgatccactgacgcgctacgaggggcaaatcaaggatgtactaccgacgccggaaaaggttaacgacgctattttctattacgcccgttttgaagtccccaaccccaatggtttgctgcggctggatatgactgcgcaagtgcatattcagctcaccgatgtgaaaaatgtgctgacgatccctctgagcgcgttaggcgatccggttggcgataatcgttataaagtcaaattgttgcgtaatggtgaaacacgcgagcgtgaagtgacgattggcgcacgtaacgataccgatgttgagattgtcaaagggcttgaagcgggcgatgaagtggtgattggtgaggccaaaccaggagctgcacaatgacgcctttgctcgaattaaaggatattcgtcgcagctatcctgccggtgatgagcaggttgaggtgctgaagggcatcagcctcgatatttatgcgggtgagatggtcgcgattgttggcgctagcggttccggtaaaagcaccctgatgaatattctcggctgtctggataaggccaccagcggcacctatcgcgtcgccggtcaggatgttgccacgctggacgccgatgcgctggcgcaactgcgccgcgagcatttcggctttattttccagcgttaccatttgcttagccatttaaccgccgagcagaacgttgaagtacccgccgtctatgctggtcttgagcggaaacagcgactgcttcgtgcccaggagttgctgcaacggctggggctggaagaccgtacagagtattatccggcacagcttagcggtggtcagcaacagcgcgtcagcatcgcgcgggcattgatgaacggtggtcaggtaattcttgccgatgaaccaaccggcgcactggacagccattctggcgaagaggtgatggcgatcctgcatcagctgcgcgatcgtgggcatacggtgattatcgtcacccacgatccgcaggtcgctgctcaggccgagcgggtgatcgaaattcgcgacggcgaaattgtgcgcaatcctcccgccattgaaaaagtgaatgttactggcgggacggaacctgttgtcaacacggtgtctggctggcggcagtttgtcagcggttttaacgaggcgctgacgatggcatggcgggcgctggcagcgaataaaatgcgtactttactgaccatgctggggattattatcggtattgcgagcgtggtttccattgtcgtggtgggtgacgccgccaaacaaatggtgctggcggatattcgttctattggtacgaatactattgatgtctatcccgggaaagattttggcgatgacgatccgcaatatcagcaggcgctgaagtacgacgacttaatcgccatccaaaaacaaccgtgggtcgccagtgccacacctgccgtcagccaaaacctgcgcctgcgttataacaatgttgatgttgctgccagtgccaatggcgtgagcggcgattattttaatgtctatggcatgaccttcagtgaaggaaacacctttaatcaggagcagctgaacggtcgtgcgcaggtcgtggttctcgacagtaatactcgccgccagcttttcccccataaagcagatgtggttggcgaggtgattctggtcggcaatatgcccgccagagtcattggtgtggcggaagaaaaacagagcatgtttggtagcagtaaagtgctgcgtgtctggctaccttacagcacgatgtccgggcgagttatgggccagagctggcttaactccattactgtcagggtgaaagaaggatttgacagcgccgaggcggaacagcaactcacgcgtttacttagtctgcgccacggaaagaaggatttctttacctggaacatggacggcgtcttgaaaactgttgaaaagaccacacgtactttacaactgtttctgacgctggtggcggtgattagcctggtggtgggcggtattggtgtaatgaatattatgctggtgagtgtgaccgagcggacgcgggaaattggcattcgcatggctgtaggtgcgcgagcaagcgatgttttgcaacagttcctgatcgaagccgtactggtttgcctggtcggtggcgcgttgggaataacactgagtctgttaattgctttcaccttgcagcttttcttacccggctgggagattggttttagtccgttggcgctgctgctggcgtttctctgcagcacggtcaccgggattttatttggctggttacccgcacgaaatgcggcacgactggatccagtagatgctctggcacgagagtaatttttgagataaaaatgccagccgatcgggctggcattttgcctttaggatgtacacaatgagacagaagagttatgcgactgccgcttctacttcgacgggcacaataacactggcgtgattgccttttggcccctggtggacatcaaactgaacggattgtccagcttttagcgttctgtaaccatccatctgaatggtggaataatgagcgaaaatatcttcgccgccgccttcagggcagatgaaaccaaaccctttggcattgttgaaccacttaacagtacccttttccatgcttcgacatccttcgcaaatcttatacaagtaagatggaataaaccggggtcagagagggggctgttcaaaacctcgccaactctagaaatacaatttagagaattagggcgagccgtcaagcatttgacaggggacaaggggcaggtatgaatcaaaaatttgaagcagttaacgctattgacaggaatgtgacagatgtcgctgatgccaacgatagatgatagttatctatcatgtggagtagattggtcaggcaaataagctcttgtcagcggcagggcgttctgccgataaccgtaaccgaagatgataactgacaatgggtaaaacgaacgactggctggactttgatcaactggcggaagaaaaagttcgcgacgcgctaaaaccgccatctatgtataaagtgatattagtcaatgatgattacactccgatggagtttgttattgacgtgttacaaaaattcttttcttatgatgtagaacgtgcaacgcaattgatgctcgctgttcactaccaggggaaggccatttgcggagtctttaccgccgaggttgcagaaaccaaagtggcgatggtgaacaagtacgcgagggagaatgagcatccattgctgtgtacgctagaaaaagcctgaatgcaggcataaaaattgggggaggtgcctatgctcaatcaagaactggaactcagtttaaatatggctttcgccagagcgcgcgagcaccgtcatgagtttatgaccgtcgagcacttgttactggcgctgctcagtaacccatctgcccgggaggcgctggaagcgtgttctgtggatttggttgcgctccgtcaggaactggaagcctttattgaacaaaccacacccgttctgcctgccagtgaagaggagcgcgacacacagccgacgctgagttttcagcgtgtactgcaacgtgcggtcttccatgtccagtcctccggtcgcaatgaggttaccggtgcaaacgttctggtcgctatctttagcgaacaggagagccaggcggcatatctgttgcgtaaacatgaagtcagccgtctcgatgtggtgaactttatctctcatggcacgcgtaaagacgagccgacacagtcttctgatcctggcagccagccaaacagcgaagaacaagctggtggggaggaacgtatggagaatttcacgacgaacctgaatcagcttgcgcgcgtgggcggaatcgacccactgattggtcgtgagaaggagctggagcgtgctattcaggttctctgccgtcgccgtaaaaacaacccgctgctggtgggggaatctggtgtcggtaaaaccgcgattgcggaaggtcttgcctggcgaattgttcagggcgatgtgccggaagtgatggctgactgtacgatttactctctcgatatcggttctctgttagcgggcacaaaatatcgcggcgactttgaaaaacgttttaaagcgttgctcaagcagctggagcaggacactaacagcatcctgtttattgatgagatccacaccattatcggtgcgggtgcagcgtctggtggtcaggtcgatgcggctaacctaatcaaaccgttgctctccagcggtaaaattcgtgtaattggtagcacaacctatcaggagttcagcaacattttcgagaaagaccgtgctctggcgcgtcgcttccagaaaattgatattactgaaccgagcatcgaagaaactgttcaaatcatcaatggcctgaaaccgaagtatgaagcgcaccacgacgtgcgttataccgcaaaagcggtgcgtgcggcggtagagctggcggtgaaatacattaacgatcgtcatctgccggataaagccattgatgttatcgacgaagcgggcgctcgcgcacgcctgatgccggtaagcaaacgcaagaaaaccgttaatgtggcggatattgagtccgtggtggcccgtattgcacgcattccagagaagagtgtttctcagagtgatcgtgataccctgaaaaacctcggcgatcgcttgaaaatgctggtcttcggtcaggataaagccattgaggcgctgactgaagccattaagatggcgcgtgcaggtttaggtcacgaacataaaccggttggtagcttcctgtttgccggccctaccggggtcgggaaaacagaggtgacggtacagcttagcaaagctttgggcattgagcttctgcgctttgatatgtccgagtatatggaacgccataccgtcagccgtcttattggtgcgcctccgggatacgttggttttgatcagggcggtttgctgactgatgcggtcatcaagcatccacatgcggtgctgctgctggacgaaatcgagaaagcgcacccggacgtgttcaatattctgttgcaggtgatggataacggtacgctgaccgataacaacggacgcaaagcagacttccgtaacgtggtgctggtgatgaccaccaacgccggggtacgggaaactgagcgcaaatccattggtcttatccaccaggataacagcaccgatgcgatggaagagatcaagaagatctttacaccggaattccgtaaccgtctcgacaacattatctggtttgatcatctgagtaccgacgtgatccatcaggtggtggataaattcatcgtcgagttgcaggttcagctggatcagaaaggtgtttctctggaagtgagccaggaagcgcgtaactggctggccgagaaaggttacgaccgggcaatgggcgctcgtccgatggcgcgtgtcatccaggacaacctgaaaaaaccgctcgccaacgaactgctgtttggtagcctggtggacggcggtcaggtcaccgtcgcgctggataaagagaaaaatgagctgacttacggattccagagtgcacaaaagcacaaggcggaagcagcgcattaatctgattgttaggtaggttggtcaagtccgtaatctcgaaagaggttacggactttttgtttatggggtggaggaggttcagaccctttttttaatgatgatggtaagttgttgataattagtgctgcgggaaggtaaggataaaaaagggtgctgcaggagaatgggatggttttgctttattaacaacgggctaaacgtgtagtatttgagttcactgccgtacaggcagcttagaaattcacaggtaacatactccacccgcccaccatgttcactgccgtacagacagataaaatgcgaaaaaaaagctcgcactttcgtacgagctcttctttaaatatggcggtgagggggggattcgaacccccgatacgttgccgtatacacactttccaggcgtgctccttcagccactcggacacctcaccaaattgttttgctaccaaacctcatgggtggcaacggggcgctactatagggagttggagtaaaacggtcaagaagaattttaatgataattattgtttgctcatactgtaaacaagttgtgcagtatatctacatcgagacaagttacggacttatacttccaaagtacttcatacatatcacaaaataaaaaggccggttaaaccgaccttttactcgttctttctcttcgcccatcaggcggtaaaacaatcagcgactacggaagacaatgcggcctttgctcaggtcgtacggggtcagttcaacagtcactttgtcgcccgtcaggatgcggatgtagtttttgcgcattttaccggagatgtgtgcagtaaccacgtgaccgttttctaactctacgcggaacatggtattaggcaacgtttcaagaacggtaccttgcatttcaatattgtcttctttggccatctaatcctctggggtatcactaccgtaatttgaaccggcaagataatgccgaagttctgtaaataagtaaagatttgcgcgctaaatcgcaacaaacaggttcggcacattactccgaaaacacacggctaagccgcaccaaaagcgcaacgtataagggagcggtgagataaacgatgggcgttacctgacgcgaaaaattccttatcggcagcggggtaatgagcgtaaccaactctgcgaccgcaattataacactctggggagaaatgtgccgaaaacattcattcttgtggactaaacaagcatcgtggtacccagaaattattcggcaatcgtccgaggcgcatttgattgagataattaaggtaatcccggcggggaatttcgcaggcaccaaggcttgctgtgtgatcgttaaggacctggcagtcgataagcttaccgccatgaccgataaattcctcacagaataccagaagcgccgttttagacgcattttccatccggctgaacatggactcgccacaaaatagcgttccctgggccacgccgtacataccgccgacaagctcatcttcacgccagacttcaatggagtgggcatggccgagttcgtgaaggcgatggtaggcttcgatcacgccacgcgtgatccaggttccttcttcgcgatcgctggcacagccttcaatgacctgaccaaaagcgtaattcatcgtgacacgataggggctgcgtttatgaaatcgcttcatactacggctgatatgcagactttctggccatagcaccgcgcggggatcggggctccaccagaggatggggtcgcctggagaaaaccacggaaaaataccacgctggtaagccattaacaggcgcgcagggctaagatcgcccccaagtgccagcaggccgttaggctcacgtaatgcgccttccggggaagggaaggctatactatggcgagaaagctgaaccaggcgcatgaccgcaaaactccacgcaagtcggatcgttcaataatagcttacaaaccctgcttgaactggtaataacgcccctgtctggcaagcagttctgcgtgagtaccttgctcaataatttgcccgttgtccatcactattatttgttggaaacgagagagtccgcgaagtcgatgggtgaccattaacaccgttttctcacgcatcatttctgcaagcaattcaaggatctggctttcggttgtggcatctaagccttcggtaggttcatccagcaacaccagtggcgcatcatgtaacagcgcacgggcgatagccagacggcgcagttcaccaccggagagctggcgtccgccttcacctaaccaactgttgagacctgcatcctcgagcagcttttccaggccaacgcgacgcaagatctcgctcagagcctcatcactactgccagggctggcgagtaaaagattatcacgcagcgtggcgctaaacagatgcactcgctgaggaacaacgctgatggtctgtcgtagagccgcttcattcaggctggctatggggctatcgttaagcaaaatctcgccctgttgcgggtcccatgcgcgggtcagctgttgtaacagtgtacttttgccgcatccggttcgcccgagaatcgctatatgttccccggcgtttacctgaagagaaatccctttaagtgcctgttgagattgctccggataagtgaactgaacatcccgtaacgtcaggctaacgcgatcggcaacacgagtttgggtatcaggaaaggtgacctccggtttttgatccgttaagtcagagatacgtacggcagaggcaatgacttgccccagatgctgaaatgcacccgttactggtgccagtgcttcaaacgcggctaacgcgcagaagacaaacagggcaattaacgcgccgggttgagcattgccgccaacgccgccagacgccatccacagcatcaggatcaccgctaacgcgccaatgagcagcattatcgcttggctcaatgcggtcagttcagattgacggcgttgcgcttccagccattgaatttctgtattctctagttgcgtgcgataacgatcgctggcaccaaaaatggtcagctcagcttgcccttgcagccaggccgtcagttgttggcgatactgtccgcgaagatgagtcagattttgcccggtgctttttcccgcacgataaaacagcggtggcatcaggaaaagcgtcagtaacataatgccgcccagcgtaaaggcgagggtgaaatcaaggaaacttaacccgattgtcaccaccataatcaccacaaaagcgcccaccagcgggctgataacgcgcaggtaaagatgatcgagcgtatcaacatccgccaccacgcgattgagcaattcgccctgacgatagcgcgccagtccggcaggggagaggggcagcaatttgctgaaggtgtaaatgcgcagatgctgcaacacgcggaaagtcgcgtcgtgacttaccagacgttcaaaatagcgcccggcagtacgggtgattgctgcgccacgcacgcccgcagcgggtagcatatagttgaagctgtacagtccggcaacccccgcaaccgcactggcgctgaggaaccagccggaaagtgtcaacagaccgatactggcgagcagcgtcacaattgccagcacaataccaagacttaacatccatttatgacgtttatacagtgccagatagggtagcaaagcgcgcatttaaatctcctcctgacgatgggccagtaatgtggcgaatgggccaccagccacacttaattccgcgtaacgtccttgctcaataatccggccatcctgcataacccaaatgacatcccagtcagcaagatcttctaactggtgggtgaccattaacgttgtctggcgcagagaggcggcattcagcgcctccattacgcgctgttcactgtgagcatcaaggctggcagcgggttcatccaacagtaataggctacagggatttagtaacgcacgggccaccgccacgcgctgcgcctgccccacggaaaggcgggcagcctggtcgccaacaggcgtatcaacgccttgtgggaggagcggtagaaactcgctgacccaggcgttatccagcgctgcttgtaattcttgttcgctggcatcaggtcgcgccagtagtacgttatcccgcaatgttgctgccggtaattgtgggttttgcccaacccaggagagatgtttacgccaactttctggacttaaatcgcgtaattctatcccgttgattcgtaggcttccctgataactgagaaaaccagaaagcgcgttcagcagactgcttttaccactaccgctgcgaccaaccaacaccgcacgttggcctgctggcaaagtaaagttcagcggtccggccagcgttttaccttccgggctcgtgataaacagctcctcggcctcaatggtcaccggatcggtgcttgctaattccgcctcaccacgttgcggatgggcgagcggggtttccataaacgttttcagactgtcagctgcgccaacagcctgggctttagcatgataaaacgtaccgagatcgcgtaatggctggaaaaactctggcgcaaggatcagggccagaaaacccgcagccagcgtcacaccggtatcgtagtgaccaaaatccagctcgccgagataggaaaaaccaaagtagaccgccaccagagcaatactcaggctggtaaaaaattcgagaatgccggaggataaaaacgccagccgtagcacttccattgtccgttggcggaaatcttcgctagcagaacgaatactttcaatttcagcttcaccacgaccaaaaatacgcaatgtttccatgccgcgcaggcgatcgaggaaatgcccacttaagcgagcaagagcgagaaagttacgtcggttagcatcggcagcccccattccaaccagcgccataaacaacggaattaacggtgcagtgcccagcagaatgagcgccgcagcccagttagaggggaagattgccaccacaatcagcaacggcacgctcactgccagcgccatttgcggcagatagcgtgcatagtaatcatgcatatcgtcaatttgctcgagtaccagcgtcgcccagctccccgcaggtttaccctgaatccacgctggccctgcttgttgcagacggtcgagaacctgacggcggatggcaaagcggatatgctgcccggcgtgataacccacccgttcgcgtaaccagaccacccatgcgcgcagtacaaaggtcagaaccagtaacgtaaagggaagcagcagggcttcacggggaatattctccataatcatatgttgcagaattcgcgccatgaaccaggcctgggcaatgatcaatatgccgctcacaaagcccagcagacgagaaatattcagccaacgttgggagatgacgctttgctgttttaaccagcgggttaactctttttgacgagatttattcattgcacgcttagcaggtgagttatcagaattatttgcagagcaatgttacaacggggaaaaaataaaggcgacccatagtcgcatggtgtcgccttctttacttttgttactgatttgtaaaattattttgcgtcagctaaaccatcgaggtagcgttccgcatcaagtgctgccatgcagcctgtaccggcgctagtaatggcctggcgataaatgtgatccatcacgtcgcctgcggcaaagacgccaggaatgctggtctgggtggcattaccatgaataccgctctgtactttgatgtagccgttttccagttccagctgcccttcgaaaatcgcagtattcgggctgtgaccgatagcaacaaacagaccggcaacgtcgagactctcgatgttatcgctgttttgcgtatcgcgcagacgaacgccagtgacacccatttgatcgccggtcacttcttccagcgtacggttggtgtgcagaatgatgttgccgttctccactttatccatcaggcgcttaatgaggattttttccgcgcggaaaccgtcacggcggtgaatcagatgcacttcgctagcgatgttagacagatacagcgcctcttcaaccgcggtattgccgccgccgatgaccgcaactttctggttgcgatagaagaaaccgtcgcaggttgcacaagcagaaaccccacggcctttaaaggcttcttcagagggcaggccgagatagcgtgcagaagctccggtggcaataatcagcgcgtcgcaagtgtattcgccgttatcgccattcagacggaacggacggttttgcagatccaccttgttgatatgatcaaaaatgatctcagtttcaaacttggtggcatgttcgtgcatgcgctccattaataacggaccggtcagatcgtttggatcgccaggccagttttccacttccgtggtggtggtcagttggccgcctttttccatgccggtaatcagcacaggttgcaggttggcgcgcgccgcgtagacagcagcggtgtatcccgccgggccactacccaggataagcagtttactgtgtttggtcgtgcccatgagatccccatagttgttggcagacaatgggcaggattgtagggaatttacagacgtaaaaaaagagtatgacgattttgttaacaatttgtgcaatcggcagcatcgataagcaggtcaaattctcccgtcattatcacctctgctacttaaatttcccgctttataagccgattaaatgatgaataaacgcccctgttaatgaatatctggcatgttgtactaaaaatcgatgttttgctttgacaatcccctggtgttttgcgaaaacattcgaggaagaaaaaaaacagtattcttatatgcgcataaccatgcatgtaaataccatgtttaccgtgctagtgaaatctacgtatggcgtggacagacgccattcgtgatgtcgatagctgccacaaggcaacggtcttctcaccgtagacccaggcattgcgcgccgtgaatcttcatgatttcggtctatcgtgacgggtagcgactctgaacagtgatgtttcagggtcagacaggagtagggaaggaatacagagagacaataataatggtagatagcaagaagcgccctggcaaagatctcgaccgtatcgatcgtaacattcttaatgagttgcaaaaggatgggcgtatttctaacgtcgagctttctaaacgtgtgggactttccccaacgccgtgccttgagcgtgtgcgtcggctggaaagacaagggtttattcagggctatacggcgctgcttaacccccattatctggatgcaagtcttctggtattcgttgagattactctgaatcgtggcgcaccggatgtgtttgaacaattcaataccgctgtacaaaaacttgaagaaattcaggagtgtcatttagtatccggtgatttcgactacctgttgaaaacacgcgtgccggatatgagtgcctaccgtaagttgctgggggaaaccctgctgcgtctgcctggcgtcaatgacacacggacatacgttgttatggaagaagtcaagcagagtaatcgtctggttattaagacgcgctaacacggaacaggtgcaaaatcggcgtattttgattacactcctgttaatccatacagcaacagtactggggtaacctggtactgttgtccgttttagcatcgggcaggaaaagcctgtaacctggagagcctttcttgagccaggaatacattgaagacaaagaagtcacattgacaaagttaagtagcggccgccgccttctggaggcgttgctgatccttattgtcctgtttgccgtctggttgatggctgccttactaagctttaaccctagcgaccccagctggagccaaacggcctggcatgaacctatccataatttaggtgggatgcccggtgcgtggttggcagatacgctgttctttatttttggcgtgatggcttacaccattcccgtcattattgtcggcggttgttggtttgcctggcgtcatcagtccagcgacgaatacattgattattttgccgttagcctacgcatcattggcgttttggcgctcatccttacctcctgtggtctggcggcaatcaacgctgacgatatctggtattttgcctccggtggcgtcattggcagcttactaagcactacgctacaaccactgctacacagtagcgggggaactattgcgctgctctgcgtttgggcagcgggcctgacgttgttcaccggttggagttgggtgaccattgctgaaaaactcggcggctggattttaaacattctcaccttcgccagtaatcgtacccgtcgcgatgatacctgggtcgatgaagatgagtatgaagacgacgaagagtatgaagatgaaaatcacggcaaacagcatgaaagtcgccgtgcccgtattcttcgcggcgcgctagcgcgtcgtaaacggttggcggaaaaattcattaatccgatggggcggcaaacagacgctgcgttgttctccggtaagcggatggatgatgacgaagagattacctacactgcacgcggtgtggctgccgacccggacgacgtcctatttagcggcaatcgtgcaacgcagccagaatatgacgaatacgatccattattaaacggtgcgccaattaccgaacctgtcgctgtagcagctgctgctaccacggcgacacaaagctgggctgcgccggttgaacctgtgactcagacgccgcctgttgcctctgttgatgttccacctgcgcaacctacagtagcctggcagcctgtaccgggtccacaaacgggagagccggttattgctcctgcaccggaaggttacccacagcagagtcaatatgcgcagcctgcagtgcaatataatgagccgctgcaacaaccagtacagccgcagcagccgtattatgcacctgcagctgaacaacctgcgcaacagccgtattatgcccctgcgccagaacaaccggtggcaggtaacgcctggcaagccgaagagcagcaatccacttttgctccacagtctacataccagactgagcaaacttatcagcagccagccgctcaggagccgttgtaccaacagccgcaacccgttgaacagcagcctgttgtggagcctgaacccgttgtagaagagacaaaacccgcgcgtccgccgctttactactttgaagaagttgaagagaagcgagcccgtgaacgtgaacaacttgcggcctggtatcaaccgattccagaaccggttaaagaaccagaaccgatcaaatctagcctgaaagcaccttctgttgcagcagtacctccagtagaagccgctgccgctgtttccccgctggcatctggcgtgaaaaaagcgacactggcgacgggggctgccgcaaccgttgccgcgccagtcttcagtctggcaaatagcggtggaccgcgtcctcaggtcaaagaggggattggtccgcagttgccacgaccgaaacgtatccgcgtgccaactcgtcgtgaactggcgtcttacggtattaagctgcccagtcagcgtgcggcggaagaaaaagcccgtgaagcccagcgcaatcagtacgattctggcgatcagtacaacgatgatgaaatcgatgcgatgcagcaggatgaactggcacgtcagttcgcccagacacagcagcaacgctatggcgaacagtatcaacatgatgtgcccgtaaacgcagaagatgcagatgctgcggcagaggctgaactggctcgtcagtttgcgcaaactcaacaacaacgttattccggcgaacaaccggctggggcgaatccgttcagcctggatgattttgaatttagcccaatgaaagcgttgctggatgatggtccacacgaaccgttgtttacgccaattgttgaacctgtacagcagccgcaacaaccggttgcaccgcagcagcaatatcagcagccgcaacaaccagttccgccgcagccgcagtatcagcagccacaacagccggttgcgccgcagccacaatatcagcagccgcaacaaccggttgcgccacagcagcaatatcagcagccgcaacaaccggttgcgccgcagcagcagtatcagcagccacaacagccagttgcgccacaaccgcaggataccctgcttcatccgctgttgatgcgtaatggcgacagccgtccgttgcataaaccgacgacgccgctgccttctctggatttgctgacaccgccgccgagcgaagtggagccggtagatacctttgcgcttgaacaaatggctcgcctggtggaagcgcgtctggctgatttccgtattaaagccgatgtcgtcaattactctccggggccggttatcactcgctttgaattgaacctggcaccgggcgtaaaagcggcgcgcatttctaacttgagtcgggaccttgcccgtagtcttagcacggtggcggtgcgtgtcgttgaagttattcctggcaaaccctatgtaggtctggagttaccgaataaaaaacgacaaaccgtttatctgcgcgaagttttggataacgccaaattccgcgataatccgagcccattaaccgtggtgctgggtaaagatatcgccggtgagccggtggttgccgatctggcgaaaatgccgcacttgttggttgcggggactaccggttccggtaaatctgtcggtgtgaacgcgatgatcctgagcatgctttataaagcacagccagaagatgtgcgtttcatcatgatcgacccgaaaatgctggagcttagcgtttatgaaggcattccgcatctgttaacggaagtcgttactgatatgaaagatgccgccaacgcgctgcgctggtgtgttaacgagatggagcgtcggtataaactgatgtctgcgctgggtgtgcgtaatctggcgggttataacgaaaaaattgctgaagccgatcgcatgatgcgtccgattccagacccgtactggaagccgggtgacagtatggatgcccagcatccggtgctgaaaaaagaaccatacattgtggtgttggttgacgaatttgccgacctgatgatgacggtaggtaaaaaagtggaagagctgatagcacgtctggcgcaaaaagcccgtgccgcgggtatccacctcgtactggcaactcagcgtccaagcgttgatgttattactggtctgattaaagcgaatattccgacccgtatcgcctttaccgtatccagtaagattgacagtcgtaccattcttgatcaggctggcgcggaaagtctgctgggtatgggggatatgctctactctgggccgaactccacgttgccggtacgtgtccatggtgcttttgttcgcgatcaggaagttcatgccgtggtgcaggactggaaagcgcgtggtcgcccacagtatgttgatggcatcacctccgacagcgaaagcgaaggtggtgcgggtggtttcgatggcgctgaagaactggatccgttgttcgatcaggcggtgcagtttgtcactgaaaaacgcaaagcgagtatttctggcgtacagcgtcagttccgcattggttataaccgtgcagcgcgtattatcgaacagatggaagcgcaggggattgtcagcgaacaggggcacaacggtaatcgtgaagtgctggccccaccgccgtttgactaactaatgcatcgtatgccggataaggcgcggtagcgtcgcatccggcactctatcaactgaaaattcagtattttcttctttcctcaagctgattattagcctggaatagagagtagagggaactcccgatcgggagtgacgtaatttgaggaataatgatgaaaaaaattgccatcacctgtgcattactcagtagcttagtagcaagcagcgtttgggctgatgccgcaagcgatctgaaaagccgcctggataaagtcagcagcttccacgccagcttcacacaaaaagtgactgacggtagcggcgcggcggtgcaggaaggtcagggcgatctgtgggtgaaacgtccaaacttattcaactggcatatgacacaacctgatgaaagcattctggtttctgacggtaaaacactgtggttctataacccgttcgttgagcaagctacggcaacctggctgaaagatgccaccggtaatacgccgtttatgctgattgcccgcaaccagtccagcgactggcagcagtacaatatcaaacagaatggcgatgactttgtcctgacgccgaaagccagcaatggcaatctgaagcagttcaccattaacgtgggacgtgatggcacaatccatcagtttagcgcggtggagcaggacgatcagcgcagcagttatcaactgaaatcccagcaaaatggggctgtggatgcagcgaaatttaccttcaccccgccgcaaggcgtcacggtagatgatcaacgtaagtaaaggcacctgagtgagcaatctgagcctcgattttagcgataatacttttcaacctctggccgcgcgtatgcggccagaaaatttagcacagtatatcggccagcaacatttgctggctgcggggaagccgttgccgcgcgctatcgaagccgggcatttacattctatgatcctctgggggccgccgggtaccggcaaaacaactctcgctgaagtgattgcccgctatgcgaacgctgatgtggaacgtatttctgccgtcacctctggcgtgaaagagattcgcgaggcgatcgagcgcgcccggcaaaaccgcaatgcaggtcgccgcactattctttttgttgacgaagttcaccgtttcaacaaaagccagcaggatgcatttctgccacatattgaagacggcaccatcacttttattggcgcaaccactgaaaacccgagctttgagcttaatagcgcactgctttcccgtgcccgtgtctatctgttgaaatccctgagtacagaggatattgagcaagtactaactcaggcgatggaagacaaaacccgtggctatggtggtcaggatattgttctgccagatgaaacacgacgcgccattgctgaactggtgaatggcgacgcgcgccgggcgttaaatacgctggaaatgatggcggatatggccgaagtcgatgatagcggtaagcgggtcctgaagcctgaattactgaccgaaatcgccggtgaacgtagcgcccgctttgataacaaaggcgatcgcttttacgatctgatttccgcactgcataagagcgtacgtggtagcgcacccgatgcggcgctgtactggtatgcgcgaattattaccgctggtggcgatccgttatatgtcgcgcgtcgctgtctggcgattgcgtctgaagacgtcggtaatgccgatccacgggcgatgcaggtggcaattgcggcctgggattgctttactcgcgttggcccggcggaaggtgaacgcgccattgctcaggcgattgtttacctggcctgcgcgccaaaaagcaacgctgtctacactgcgtttaaagccgcgctggccgatgctcgcgaacgcccggattatgacgtgccggttcatttgcgtaatgcgccgacgaaattaatgaaggaaatgggctacgggcaggaatatcgttacgctcatgatgaagcaaacgcttatgctgccggtgaggtttacttcccgccggaaatagcacaaacacgctattatttcccgacaaacaggggccttgaaggcaagattggcgaaaagctcgcctggctggctgaacaggatcaaaatagccccataaaacgctaccgttaatgttatcgttgcggtaatgttgttactgtatccctgtggtcgcaggctgtggccacatctcccatttaattcgataagcacaggataagcatgctcgatcccaatctgctgcgtaatgagccagacgcagtcgctgaaaaactggcacgccggggctttaagctggatgtagataagctgggcgctcttgaagagcgtcgtaaagtattgcaggtcaaaacggaaaacctgcaagcggagcgtaactcccgaagcaaatccattggccaggcgaaagcgcgcggggaagatatcgagcctttacgtctggaagtgaacaaactgggcgaagagctggatgcagcaaaagccgagctggatgctttacaggctgaaattcgcgatatcgcgctgaccatccctaacctgcctgcagatgaagtgccggtaggtaaagacgaaaatgacaacgttgaagtcagccgctggggtaccccgcgtgagtttgactttgaagttcgtgaccacgtgacgctgggtgaaatgcactctggcctcgactttgcagctgcagttaagctgactggttcccgctttgtggtaatgaaagggcagattgctcgcatgcaccgcgcactgagccagtttatgctggatctgcataccgaacagcatggctacagtgagaactatgttccgtacctggttaaccaggacacgctgtacggtacgggtcaactgccgaaatttgctggcgatctgttccatactcgtccgctggaagaagaagcagacaccagtaactatgcgctgatcccaacggcagaagttccgctgactaacctggtgcgcggtgaaatcatcgatgaagatgatctgccaattaagatgaccgcccacaccccatgcttccgttctgaagccggtagttatggtcgtgacacccgtggtctgatccgtatgcaccagttcgacaaagttgaaatggtgcagatcgtgcgcccagaagacagtatggcggcgctggaagagatgactggtcatgcagaaaaagtcctgcagttgctgggcctgccgtaccgtaaaatcatcctttgcactggcgacatgggctttggcgcttgcaaaacttacgacctggaagtatggatcccggcacagaacacctaccgtgagatctcttcctgctccaacgtttgggatttccaggcacgtcgtatgcaggcacgttgccgcagcaagagcgacaagaaaacccgtctggttcataccctgaacggttctggtctggctgttggtcgtacgctggttgcagtaatggaaaactatcagcaggctgatggtcgtattgaagtaccagaagttctgcgtccgtatatgaacggactggaatatattggctaatacccaatttttctgaatctaaaaagcgcctgcgggcgctttttttgtctccctttgataccgaacaataattactcctcacttacacgtaatactactttcgagtgaaaatctacctatctctttgattttcaaattattcgatgtatacaagcctatatagcgaactgctatagaaataattacacaatacggtttgttactggaatcaatcgtgagcaagcttgagtgagccattatgaaaacgaaaatccctgatgcggtattggctgctgaggtgagtcgccgtggtttggtaaaaacgacagcgatcggcggcctggcaatggccagcagcgcattaacattaccttttagtcggattgcgcacgctgtcgatagcgccattccaacaaaaagtgacgaaaaggttatctggagcgcctgtacagttaactgtggtagtcgctgcccgctacgtatgcacgtcgtggacggtgaaatcaaatatgtcgaaacggacaataccggcgatgacaattacgacggcctgcaccaggttcgcgcctgcctgcgtgggcgttccatgcgtcgccgtgtctacaatccggaccgcctgaaatatccgatgaaacgagtcggggcgcgcggtgaaggcaaattcgagcgcattagctgggaagaagcctacgacatcatcgcgaccaatatgcagcgcctgatcaaagagtacggcaacgagtctatctatctgaactatggcaccggtacgctgggcggcaccatgacccgctcctggccgccgggaaataccctggtcgcgcggctgatgaactgctgcggcggctatctgaaccattacggcgactactcctccgcgcaaattgcggaaggtttgaactatacctacggcggctgggcagatggcaacagcccgagcgatatcgaaaacagtaagctggtagtgctgtttggtaataaccctggcgaaacgcgaatgagtggcggtggggtgacttactatcttgaacaggcacgccagaaatctaatgcccgcatgatcatcatcgatccgcgctataccgacaccggtgccgggcgcgaagatgagtggatccctattcgtccgggaacagatgccgcactggttaacggtctggcgtacgtcatgatcactgaaaacctggtggatcaggcattcctcgataaatattgcgttggctacgatgagaaaaccctgccagccagtgcgccgaaaaatggccactataaagcttatattctgggtgaagggccagatggcgtggctaaaacgccggaatgggccagccaaatcactggtgttccggcagacaaaatcatcaaattggctcgtgaaatcggtagtaccaaaccggcgtttatcagccagggatggggcccgcagcgtcacgctaacggtgaaatcgcaacccgtgctatcagcatgctggcgattctgaccggtaacgttggtattaacggaggcaacagcggcgcgcgtgaaggtagttacagcttaccgtttgtccgtatgccgaccttggaaaacccgatccagaccagcattagcatgtttatgtggaccgatgccattgaacgtggcccggaaatgacggcgctgcgtgatggtgtacgcgggaaagataagctggatgtgccgatcaaaatgatctggaactatgccggtaactgcctgattaaccagcattctgaaatcaaccgtacccatgaaatccttcaggatgataagaagtgcgagctgattgtggttatcgactgccacatgaccagtagcgcgaaatatgctgacatcctgctgcctgactgcaccgcttccgaacagatggactttgcgctggatgcatcctgcgggaatatgtcttacgtgattttcaacgatcaggtgattaaaccgcgctttgaatgtaagaccatctatgaaatgaccagcgaactggcaaaacgtcttggcgttgagcaacagtttactgaaggccgtacccaggaagagtggatgcggcatctgtatgcccagagccgggaagcgattcctgaactgccaacgtttgaagagttccgcaagcaggggatctttaaaaagcgcgacccacaagggcatcacgttgcttataaagccttccgtgaagatccgcaggcaaacccactgactacgccaagcggcaaaattgagatttatagccaggcgctggctgacattgccgctacctgggaattgcctgaaggcgatgtgatcgatccactgccgatctacacgccgggctttgaaagttatcaggatccgctgaacaaacagtatccgctgcagcttacaggtttccactataaatctcgcgttcacagtacttacggcaacgttgatgtgctgaaagcggcttgccgtcaggaaatgtggatcaacccgcttgatgcccaaaaacgcggtatccacaacggcgataaagtcaggatctttaacgatcgtggtgaggttcatattgaggcgaaagtgacgccacgaatgatgccgggtgtggtcgcactgggtgaaggtgcctggtatgacccggatgcaaaacgtgtcgataagggtggttgtattaacgtactgaccactcaacgtccgtctcctctcgctaaggggaatccgagtcatacaaaccttgttcaggttgaaaaggtgtaaggagtaaccgatgacaacccagtatggattttttattgattccagccgttgcaccggttgcaaaacctgcgagctggcctgtaaagactacaaagatttgacgccagaagtcagcttccgccgcatttatgaatatgctggcggcgactggcaggaagataacggtgtctggcaccagaacgtgtttgcctactatctgagcattagttgtaaccactgcgaagatccggcttgtactaaagtctgcccgagcggtgcgatgcataaacgtgaagatggttttgttgtggtcgatgaagatgtgtgcattggctgccgctactgccatatggcttgcccgtatggcgcaccgcaatataacgaaacgaaaggccatatgaccaaatgcgatggttgttatgaccgtgttgcggagggtaaaaagccgatctgtgttgaatcttgtccgctgcgggcgctggatttcggccctatcgacgagctgcgtaaaaaacatggcgatctggcggccgttgcgccgttgccgcgagctcactttaccaaaccgaatattgtgatcaaacccaatgccaatagccgcccgaccggggataccactggctatctggcaaacccgaaggaggtgtgagatgggaagtggatggcatgaatggccgctgatgatcttcacggtcttcgggcaatgtgtagcaggtggttttatcgttctggctttggcgctgctcaaaggcgacctgcgagcagaagcccagcagcgtgttatcgcctgcatgtttggtttatgggtgctgatgggcattggctttatcgcctctatgctccatcttggtagtccaatgcgcgcttttaacagcctcaaccgggtaggggctagtgcactcagtaacgaaatcgccagcggtagcatcttttttgccgtaggcggcatcggctggttgctggcaatgctgaaaaagctgagtccggcattgcgtacgctgtggctgatagtgacgatggttcttggcgtcatctttgtctggatgatggtgcgtgtgtataacagcattgataccgttccgacctggtacagcatctggacgccgatgggcttcttcctgacgatgtttatgggcggcccgttactgggttacctgttgttgagtctggctggcgtcgatggctgggcgatgcgtctgctgccagcaatttctgtactggcactggtagtgagtggcgtggtgagtgtgatgcagggcgcagagctggcgactattcatagttctgtgcagcaggccgcagcgctggtgccggactatggtgcgctgatgtcctggcggatcgtgcttttggccgttgccctgtgcttgtggattgcaccacagctaaaaggttatcagcctgcggttccgctactttctgtaagtttcattctgcttctggcaggggaattaatcggtcgcggcgtattctatggtttgcatatgaccgtggggatggccgtcgcaagctaatcataacaaccggggtttcggccccggttctcttttatttctgcttcgttaacgtgtcataactggtcatcaaattacgataatcaggaatgtggttagagaacaacgtcgccagtccttcaatatcattacgccagtcgcgatgcagctcgcacgccacgccgaaccatgtcatcaattgcgcaccagcttggctcaagcgatcccatgcgctatgccgggtaatttcattaaaggtcccactcgcgtcagtcacgacaaagacgtcaaacccttcttcaatggcactaagcgccgggaatgccacgcaaacttcggttaccacaccggcaataattaactgttttttacctgtcgctttgacagcttttacaaaatcttcgttatcccaggcgttaatatttcccgggcgagcaatgtaaggtgtatcggggaattgtgctttcagttctggaactaatgggccgttaggaccggtttcaaaactggtggtaagaatagttggtaagttgaaatacttagccaggtcacccagcgccagcacgttatttttaaacttatcgggttcgatatcccgtacaagggaaagtaaaccagcctggtgatcaacaagcaaaacggcagcatcatttttatcaagacgaacatacggtttggtcatcctcttctcctttcgagagtcagtggtacgtctgaaatcgatcagacgcgatgcattgctctgaaagcatagacgggaaatatgagtttgctgtgaccatgaaatttttcgactgaacgaagcgtatgaaatttgtgttagttcaataaaaacaatcagatgagactaatcatctcttcagcattagcgttatgaatgagtaatataaatcgataataccgccgctgggatatcgcgtattttcacccattgacaatgtttttggcggtggcatgatgcgcatgaaatttgaacttcctcacggttttaattcatgtccacgtatacccagcctgtcatgcttttgctgtctggcctgcttttgttgactctggcgattgcggtgttaaatacactcgtgccgctttggctcgcccaggaacacatgtccacatggcaggtaggcgttgtcagcagttcctattttaccggcaaccttgtcggtacattgctgacagggtatgtcattaagcgcattggctttaaccgcagctattatctggcctccttcatttttgccgctggctgtgccggccttggcctgatgattggattctggagctggttggcttggcgttttgtcgcgggcgtcggctgtgccatgatttgggtggttgttgagagcgcgctgatgtgcagtgggacgagtcgtaaccgtgggcgtttgcttgctgcgtatatgatggtttattacgtgggaacgtttttaggccagttactggtcagcaaagttagtaccgagctgatgtccgtattgccgtgggttacaggtttgacgttggcagggatcttaccgctgttgtttacgcgtgtgctgaatcagcaggctgaaaaccatgatagcacgagtattacgagtatgctaaaactccgtcaggcgcggcttggcgtgaatggctgcattatcagtggaatcgttctgggatctctatatggcctgatgccgctgtacctcaatcacaaaggggtgagcaatgccagcattggtttctggatggcggtactggtcagtgcgggtatccttggacaatggccgattggacgtctggcggataagtttggtcgactgctggtgttgcgtgttcaggtctttgtcgtcattctcggcagtatcgcgatgcttagccaggcggcgatggccccagcgttattcatcctcggtgccgctggctttacgctatatccggtggcgatggcatgggcttgcgagaaagttgaacatcatcaactggtggcgatgaaccaggccttactgttgagctatactgtgggaagcctgcttggcccgagttttaccgctatgctaatgcagaatttctccgataatttattgtttatcatgatcgccagcgtaagctttatctatttgctgatgctgctgcgcaacgccggtcatacgccgaaacccgttgctcacgtgtaaatgaattcaagcagagtgtgaacttactgtttcacactctgcttttttgtttcttctatctgacttgctttattccaaattttattcgtttaaaaataaaatgtgcagcaggttataattttgcatttcgctatttccgcacttcttatttgccgcgcataatccctcgttttaccgatgcccctttaattttggcgaaggatttgtctatggctgggaatgttcaggaaaaacagttgcgatggtacaacattgcgctgatgtcttttatcactgtctggggttttggcaacgttgttaataactatgccaaccaggggctggtggttgtttttagttgggtgtttatctttgcactctatttcacaccttatgcgctaattgttggtcagttaggcagcaccttcaaagatgggaagggcggggtcagtacctggattaaacacacgatgggacccggactggcttatctcgccgcgtggacctactgggtggtgcatattccctatctggcacaaaaaccccaggcaattctgattgcgctcggttgggcgatgaaaggcgacggtagcctaatcaaagaatatagtgtcgtagcgttacaggggttaacgctggtgctgtttatcttctttatgtgggttgctagtcgcggtatgaaaagcctgaaaatcgtcggttctgtggcagggattgctatgtttgttatgagtctcctgtatgtggcgatggcggtaaccgcgcctgcaattactgaagtgcatattgcgaccacaaacattacctgggaaacgttcattcctcatatcgactttacctacattaccactattagtatgctggttttcgcggttggcggagcagagaagatttctccttacgttaatcaaacgcgcaacccaggaaaagaatttccaaaagggatgttatgcctggcggtgatggttgcggtttgtgccattctgggcagcctggcgatggggatgatgtttgatagccgtaatatcccggatgacttaatgaccaacggtcagtattacgcctttcagaagctgggcgagtattacaacatgggtaatactttaatggtgatttacgccattgcgaataccctgggacaagtagcggcgctggtattcagcattgatgccccgcttaaagtgctattaggtgatgctgacagcaaatatattccagccagtttatgtcgtaccaacgcttctggtacgcccgttaatggctattttctgaccctggtactggtggcgattctgattatgctgccgactctcggcattggtgatatgaacaatctctataaatggctgttgaaccttaatagcgtagtgatgccgctgcgttatttatgggtatttgttgcatttattgcagtcgttcgcttggcgcagaaatataaaccagaatatgtctttattcgtaataagcctctggcaatgaccgtcgggatttggtgttttgcctttaccgcctttgcctgtttgacggggatcttcccgaaaatggaagccttcactgcagagtggaccttccagttggcgctgaatgttgcaacgccgtttgtgctggtaggattaggactgatattcccgctgctggcgcgtaaagcgaatagtaaataattattgtggtcggtgacgctgactctggcagatctgacccgtttttacataatcgagaaatgcgcgcaagccgcaggacatatactggcggtttggataatagatctggaagcctggacgctctgtgctccagtcttccagtacacattctaaacgaccagtatcaaggtactccttgatctgttcatagagcagatacccgataccagcacccatcaaaacggcctccagttcagcatcaacatcatccagaatgatatttcctgcgacagcaatttccagctcctttgcaaattgccagtggaaaggtttgccgctgggataacgaaaaacaacacattgatgattaagcagatcatgaggatggcggggtttgccatatcttgcaaagtactctggcgttgctgctacacataatttcactggcgggccgatcgccacgctgatcatatctttttcgacgatgcaactaagtcgaacgccagcgtcaaagccctgttggacgatatcgacaagagagtcgtcagttgtgagctcgactttaatatcaggatattcacgtgtgaaaccaaccagtaaagacattaaaaatatacgtgcagctacccgggcggcattgattttgagcgttcctgtcggtgtcagacgaaaatcattcatctcatctaacatgatctgaatttcgtcgaaagctgggcgcaatcgttcatagagattagaacccgcttccgttaagcttacgcttcgggttgtccgattgaataagcgaattttaagacgttgttccagtgttttaatactatggctaatggcggagctggataagcctaactcatcgcccgctgcacgaaagctttgattacgggccacggcaaagaaagtggcaaagtcagacatattcatccgcattagtgaaaatccttcattaactcatcctgaatcatcacgtttacaggattatgccgcctgcgtaaagtgcgctccagaacttaacgtggaggtaaaattatgcagtctgaacgtatttatttggtatgggcccatcctcgtcatgatagtttgaccgcacatattgctgatgcgatccatcagcgggcaatggagcggaaaatacaggtgacggaactcgatttatatcggcgtaatttcaacccagtgatgacgccggaagatgaaccagactggaagaatatggataaacgttattctccagaggttcatcagctttatagtgagctgcttgaacatgacacgttagtggtggtttttcctctctggtggtacagcttcccggcaatgctaaaaggatatattgacagagtatggaataatgggctggcttatggagatgggcacaaattaccattcaataaagttcgttgggtggcgctggttggaggagacaaagaaagttttgtccagatgggctgggaaaaaaatataagcgattatttaaaaaatatgtgcagttatcttggtattgaagatgccgatgtcactttcttgtgtaatacagtggtattcgatggggaagaacttcacgcgagctattatcagagcttattatctcaggtacgggatatggtagatgcactataagatgtgttaaaaacgctgtagcagaatgaagcgcggaataaaaaagcggcaactcaataaagttgccgctttacggggaaattagaacattaccttatgaccgtactgctcaagaatgcctttcacgcgttccatggtctctttcttcggtggtttaacaccgtcgagtttgtactcttcacccattgccacccatttgtgtttgcccagctcgtggtaggggagaagctcgattttctcaacgttgcccatatcacgggtaaattcaccgaggcgatgcgcactatcgtcatcgtcagaccagcctgggacaacaacgtagcggatccacaccttcacatttttgttcgccagatatttagcgaactccagcgtgcggtggttggaaactccaaccagattttggtggatctcgtcgttcatctgtttgagatcgagcattaccaggtcggttacttccagcagttcatcaatcaccggatcgtaacgacgaacaaaaccgttggtgtccagacaggtatgaatgccttcttttttgcaggcgcggaaccagtcacgaacaaactcagcttgcaggattgcttcaccgccggatgcggtaacgccgccgccggaagcgttcataaagtggcgataggtcaccacttccttcatcaaatcttcaacggtaacttctttaccgccatgcgtgtcccaggtgtcgcggttatgacaatacaggcagcgcatcaggcagccctggaaaaaggtgataaagcgaatacctgggccgtctacggttccacaggattcaaaggagtgaatgcgaccaataacactcattgcggtgtttctccagatgtggcccatctgaggccgtgttggtgcgcagctcgaaggctacgtcgagtctgttttggcagtcaccttaaagtatagatagctgacaaaaaaggctctcgcgctaaaaaaggccccactttcgtggagcctttattgtacgctttttactgtacgatttcagtcaaatctaattacatagattgagtgaaggtacgagtaataacgtcctgctgctgttctttagtcaggctgttgaaacgtactgcgtagccagatacacggatggtcagctgcggatatttttccgggttttccatcgcgtcgagcagcatttcacggttcatcacgttaacgttcaggtgctgaccaccttcgatggatgcttcgtggtggaagtaaccatccatcagaccagccaggttggtcttacgaacttcgtcgtctttacccagtgcgttcggaacgatagagaaggtgtaggagataccatctttagcgtaagcaaacggcagtttagcaacggaagtcagagaggctactgcacctttctggtcacgaccgtgcatcgggttagcacccggtccgaacggcgcgccagcacgacgaccgtctggggtgttacccgttttcttaccatacacaacgttagaagtgatggtcagaacagactgagtcgggatagcgtcacggtaggtgtgcagtttctgaattttcttcatgaaacgttctaccaggtcaacagccaggtcatctacacgcggatcattgttaccaaactgcgggtattcgccttcgatttcgaagtcgatagccagaccgtcttcgtcacgaatcggtttaactttcgcatatttgattgcagacagggagtcagcagcaacggacagaccagcgataccacacgccatggtgcggataacgtcacggtcgtgcagcgccatcagagaggcttcgtagctgtacttgtcgtgcatgtagtggatgatgttcagtgcagtgatgtactgtttagccagccagtccatgaagtgatccatgcgctccatcacttcatcatagttcaggacatcgcctttgatcggttcagacttcggaccaacctgcattttcagtttttcgtcaacgccgccgttgattgcgtacagcatggttttcgccaggtttgcacgcgcaccgaagaactgcatttgtttaccaacgatcatcgggcttacgcagcaagcaatagcgtagtcatcgttgttgaagtccggacgcatcaggtcatcgttctcatactgcagagaagaggtgtcgatggacactttagcggcgaatttcttgaagttcagcggcagtttttcagaccacagaatggtcatgttcggttccggagacggacccatggtgtacagggtgttcaggaaacggaagctgtttttggtaaccagggtacgaccgtcgaggcccataccaccgatagattcggttgcccagatcgggtcgccagagaacagttcatcgtattccggagtacgcaggaagcgaaccatacgcagtttcatgaccaggtggtcaaccatttcctgcgcttcttgttcggtgatcttgccagctttcaggtcacgttcgatgtacacatccaggaaggtggaggtacgaccgaaggacattgcagcaccgttctgagacttaacagcagccaggtagccgaagtaagtccactggatagcttcctgagcgttggtagccggaccagagatgtcgtagccgtatttcgcagccatttctttcatctgacccagagcgcggtgctgttcagcgatttcttcgcgcagacggatagtctgttccaggtttacgccgttttccagatcagcctgcagagaagtgaactgtgccagtttgtctttcatcaggtagtcgataccgtacagcgcaacgcgacggtagtcaccgatgatacggccacggccatatgcatctggcagaccggtcagaacaccagatttacggcaacgcaggatgtccggagtgtaaacgtcgaacacgccctggttgtgagttttacggtattcagtgaagatttttttgatcatcggatccagttcgcggttgtacgctttgcaggaaccttcgatcattttgataccaccgaacgggataagagcacgtttcagcggagcttcagtctgcagaccaacgattttctcaagctgcttgttgatgtagccagcgtcgtgagaggtgatggtggaagcaacagcggtgtcaaagtcaactggcgcgtgagtgcggttttccagtttaacgccttccattactttgtcccacagggtggtggtcgcttcagtagcgccagccaggaaggactcgtcaccctcgtacggagtgtagtttttctgaatgaagtcacggacgtttacttcattctgccagtcacctttggtaaaaccttcccaggctgtggctaacttttcattaagctcggacatgtaacacctaccttcttaagtggattttttatttactgcgtacttcgacaaccattaatggtggtcgttttcacgcaggtaaatgacccagtatgtcaacccaaccaacaaaccaccaccgataatgttgccgatcgtaaccggaatcaggttatcagtgatgaaattcatcacggtcaggtgagaaaaattttccggtgcagaaccgactgcggtccaaaattccggggatgcgaagtcgcggattacaatacccatcgggatcataaacatgtttgcgatactgtgctcaaaaccgctggcaacaaacatcgcgaccggcagcaccataatgaacgctttgtccatcaggctgcggccagaataactcatccatactgccagacataccatcaggtttgccaggataccaagacagacggcctcaataaaagtatggtgcactttgtggtcggcggtttgtaggacgtttagtccccattgaccatttgcggtcatatactcgccggaaagccacattaaaagtacaaacagcagtgcgccgaccaggttgccaaaatagacatttagccagtttttcgccaactgaccccaggtgatgcgcccactcgccttagcaacaacaatcaacacggtggaagtaaagagatcggctccgcagacaacacaaagaatcagccccagagagaagcaaatgccgccaaccagttttgccatgccgaagggcattgtgcctgtgccagtggttgctgtgatatagaagacgaatgcgatactgatgaaaacaccggcggtaatcgccagatagaaagtcttaagcggatgtttcgttgctttatagacacccgcctcttcggccactttggccattgcagcaggaagtaaaagatcaaaagggttgtcagctttcacactaactctctctttattaagtcggcgacgagatactaacaaagcattatagatgagaaattgatatagatcatatctcgcctggcttataggcccgtaactcgcatggtttttatgcaaatacggagtaaatatttgattatccaaataaaaataaattttaaaaattaacaaatgagttgaattttttccgcatcctccgctaaaacagttaattaaaagggagcatcaggcgaataaagtaacaatatcgatcgtatttattaaatacaaattaccgatatttaaccttataattacaattattttattaatgcaaatatatgtaaagcggggcattaaaaaaacgccccgtaatataactcagactaatcattaagcctacattgcgtaggctatttgattttattttgcccagaatgctgctttggcgcgctgcagcttttcgtaggccttcaacaagctctgatgtgcagcaaacgcgtgcagatcgctatctaccggttgcaggccgtaaaacgccgcttcgccgctcattgccgcactggcggcttctacggcatctgcgccgtacatgcgaacaaacgcattcagatattgcagcggctggcgatcttcttcctgtgccagtaataacaacgtttgcaggcagcgataatagttggcgcgttccggactaaatacactactgttaaactccatcgtccattcggtccagaccagagcctgttccagatcgccaccagccagcgccagcatggcttttaattcaccgatacgcagggtgtaccaaccgttatcgctcccggtcgccagacccaacagctcacgcacgcgggtaaagtcatcaaaaccttcttcatccagttgctcgatgaggttcaggtaatcttctttttcccactcgctgcctggtaggctaagaatcgtttcacgtaaatggctgcccatactgttattcgcgagccacagatcttcagccggataaatatcggacatgccaggcacgataatacggcaagcataaacgcccagatgctcgtaatcggcaatataaacttctttatcttctttgttgaagatagccatcagtgtggcgaactcttcttccgtggtgccggagaaattccagtccacaaacggataatcggcatcctgcttgaacaggtcccaggagattaaaccgctggaatcgataaagtgcgtttcgaggttggtatgttcagcgacttcttcatcatcgaaggttggcggagtaaacacatccaaatctttcaggccacgaccttgcagcagctcggtcacggtacgttccagtgctacgccaaaatcaggatgcgcaccgaaagaggcaaagcaggtaccgttagcaggattgaacagtaccacgcaaatcaccggatactggccgccaaggctaccgtcataagcgaagattgggaaaccctccgcttccagcgtttcgatggcttcaactactgctgggtaacgcgccagcacgtctgccgggatctctggcaggctgatgctttcagcaataatgcggtttttcacgtagcgttcgaaaacttcagacaatccctgaacgcgtgcttcgttgcgggtattacctgcggacataccgttggagacgtacaggttaccaatgatattcatcggaatataaacggtctgattgtcggactgacgcgtaaacggcaggccgcaaataccacgatcttcgttaccggattgtaggtcaatcagcatgctgccggtcagttcattctccggatcataaaacgcgcgcagacggtcatcgagcagcccttctggcacatcgtcattttcggtcagtgggaaccatttttcgttgggataatgcacgaacggaccgttggcgatggtttcgcccagccagaagtccgcaaaaaagtagttggtactgagacgctcgaaatattcaccgagtgcagaagccagcgccgctttcttggttgcgcctttaccgttggtaaaacacagtgcgcactctttgtcgcgaatatgtacagaccagacgttaggcacgggattcagccaggaggcctcttcaatctgaaagccgaggtcactaagtttttgctggaagcgagcgatggaatcttccagagcggcatctttgccggggataaatgtttgcgtcatgaaaatcactttagtcgtacggaaagcgcgcaataatacgggttttatctcaaaggcgctatcaccgccgccatgccgatgaactgttgactatgcttttagcggataaaccacgttaagagcataaaaatgaaggcgttcgatctccaccgtatggcatttgataaagtgccttttgatttccttggcgaagttgcactacgtagtctttatacctttgtactggtctttttgttcctcaaaatgaccggaagacgcggtgtgcggcagatgagcctgtttgaagttttaatcattctgacgctgggaagtgcggcgggagatgtggcgttttatgatgatgtgccgatggtcccggtacttatcgtctttattactctggcgttgttataccgcctggtaatgtggttgatggcgcacagtgaaaaactggaagatcttctggaaggcaagccagttgtcattattgaagatggcgagctggcctggagcaaactcaataactccaacatgacggaatttgagttctttatggagctacgattgcgtggcgtggagcagctggggcaggtacgtctggcgattctcgaaaccaacgggcaaatcagtgtctatttctttgaagatgacaaggtgaaaccgggtttacttattttacccagtgattgtacgcagcgttacaaagtggtgccggagagcgcggactatgcctgtattcgttgtagtgaaatcattcatatgaaagcgggggaaaaacaattatgtccgcgctgtgcaaatccagaatggacgaaggcaagtcgggcaaaacgggtgacctgacagtaaaaacatcggctttttgctaataatccgagagattcttttgtgtgatgcaagccacatttttgccctcaacggttttactcattgcgatgtgtgtcactgaatgataaaaccgatagccacaggaataatgtattacctgtggtcgcaatcgattgaccgcgggttaatagcaacgcaacgtggtgaggggaaatggctcaaatcttcaattttagttctggtccggcaatgctaccggcagaggtgcttaaacaggctcaacaggaactgcgcgactggaacggtcttggtacgagcgtgatggaagtgagtcaccgtggcaaagagttcattcaggttgcagaggaagccgagaaggattttcgcgatcttcttaatgtcccctccaactacaaggtattattctgccatggcggtggtcgcggtcagtttgctgcggtaccgctgaatattctcggtgataaaaccaccgcagattatgttgatgccggttactgggcggcaagtgccattaaagaagcgaaaaaatactgcacgcctaatgtctttgacgccaaagtgactgttgatggtctgcgcgcggttaagccaatgcgtgaatggcaactctctgataatgctgcttatatgcattattgcccgaatgaaaccatcgatggtatcgccatcgacgaaacgccagacttcggcgcagatgtggtggtcgccgctgacttctctagtaccattctttcccgtccgattgacgtcagccgttatggtgtaatttacgctggcgcgcagaaaaatatcggcccggctggcctgacaatcgtcatcgttcgtgaagatttgctgggcaaagcgaatatcgcgtgtccgagcattctggattattccatcctcaacgataacggctccatgtttaacacgccgccgacatttgcctggtatctatctggtctggtctttaaatggctgaaagcgaacggcggtgtagctgaaatggataaaatcaatcagcaaaaagcagaactgctatatggggtgattgataacagcgatttctaccgcaatgacgtggcgaaagctaaccgtagccggatgaacgtgccgttccagttggcggacagtgcgcttgacaaattgttccttgaagagtcttttgctgctggccttcatgcactgaaaggtcaccgtgtggtcggcggaatgcgcgcttctatttataacgccatgccgctggaaggcgttaaagcgctgacagacttcatggttgagttcgaacgccgtcacggttaatgccgaaattttgcttaatccccacagccagcctgtggggtttttatttctgttgtagagagttgagttcatggaatccctgacgttacaacccatcgctcgtgtcgatggcactattaatctgcccggttccaagagcgtttctaaccgcgctttattgctggcggcattagcacacggcaaaacagtattaaccaatctgctggatagcgatgacgtgcgccatatgctgaatgcattaacagcgttaggggtaagctatacgcttagtgccgatcgtacgcgttgcgaaattatcggtaacggcggtccattacacgcagaaggtgccctggagttgttcctcggtaacgccggaacggcaatgcgtccgctggcggcagctctttgtctgggtagcaatgatattgtgctgaccggtgagccgcgtatgaaagaacgcccgattggtcatctggtggatgcgctgcgcctgggcggggcgaagatcacttacctggaacaagaaaattatccgccgttgcgtttacagggcggctttactggcggcaacgttgacgttgatggctccgtttccagccaattcctcaccgcactgttaatgactgcgcctcttgcgccggaagatacggtgattcgtattaaaggcgatctggtttctaaaccttatatcgacatcacactcaatctgatgaagacgtttggtgttgaaattgaaaatcagcactatcaacaatttgtcgtaaaaggcgggcagtcttatcagtctccgggtacttatttggtcgaaggcgatgcatctagcgcttcttactttctggcagcagcagcaatcaaaggcggcactgtaaaagtgaccggtattggacgtaacagtatgcagggtgatattcgctttgctgatgtgctggaaaaaatgggcgcgaccatttgctggggcgatgattatatttcctgcacgcgtggtgaactgaacgctattgatatggatatgaaccatattcctgatgcggcgatgaccattgccacggcggcgttatttgcaaaaggcaccaccacgctgcgcaatatctataactggcgtgttaaagagaccgatcgcctgtttgcgatggcaacagaactgcgtaaagtcggcgcggaagtggaagaggggcacgattacattcgtatcactcctccggaaaaactgaactttgccgagatcgcgacatacaatgatcaccggatggcgatgtgtttcagcctggtggcgttgagtgatacaccagtgacgattcttgatcccaaatgcacggccaaaacatttccggattatttcgagcagctggcgcggattagccaggcagcctgaatgaacaacgggcaataaatagccaaatctttctttatcaaaacgtcggcacattgtcggcgttttttttcggaccttgtgagtcattttgattaatggtagcgtcgcttgtcaatgtaagttgttgatacataatatttatatatgattaatcaacggatgattcacatgaagaatactaaattactgctggcgattgcgacctctgcagcattactgacagggtgtcaaaatacccacggtattgataccaatatggctatcagctccggtttaaatgcctataaagcagcaacattaagcgatgccgatgcaaaagcgattgccaatcagggctgtgccgaaatggacagcggcaatcaagtcgcaagtaaatccagcaagtacggtaaacgtctggcaaaaatcgccaaagcattgggtaacaatattaatggcacgccggtcaactataaggtttatatgaccagcgacgtcaacgcatgggcgatggcgaacggctgtgttcgtgtctacagtggcctgatggacatgatgaatgacaacgaaattgaaggcgttctgggccatgaactgggccacgtcgcgttgggtcacagcctggctgaaatgaaagcttcttatgcgatcgttgccgcacgcgatgccattagtgctaccagcggtgtggcttcccagctttcccgcagtcaattaggtgatatcgcagaaggcgctatcaatgctaaatactcccgtgataaagagtccgaagcagatgatttctcctttgatctgttgaagaaacgtggcatcagcacccaggggctggttggcagctttgaaacactggctagcctggatggcggtcgcacccagtccatgtttgactctcacccaccaagtacagagcgtgcgcaacacatccgtgatcgtatcgcctctggtaagtaaatcattgtcatctttcgggctggtcttctgccagcccgctataattgcgcaataaatccccatctgaatacagacaaaactggtttttgcacacaacgttaacgatttgtggcgtcggcgcgtataatgcgcgcggttatgttaacggtacgcctgttttaaggagataaagatgacggcaattgccccggttattaccattgatggcccaagcggtgcagggaaaggcaccttgtgtaaggctatggcggaagcgttgcaatggcatctgctggacagcggtgcaatttatcgcgtactggcattggcggcattacatcaccatgttgatgttgcgagcgaagatgcgctggtaccgctggcatcccatctggatgtacgttttgtgagcaccaatggcaatctggaagtgatcctcgaaggggaagatgtcagcggcgaaattcgtactcaggaagtggcgaatgcagctagtcaagtcgcggcattcccacgcgttcgtgaagcattattgcgtcgccaacgcgcgtttcgcgaattaccaggtctgattgccgatggccgcgacatgggaacggtggtattccctgatgcaccagtgaaaattttccttgacgcctccagcgaagaacgtgcgcatcgccgcatgctacagttgcaggagaagggctttagtgttaactttgagcgccttttggccgagatcaaagaacgcgacgaccgcgatcgtaaccgagcggtagcgccactggttccggcagccgatgctttagtgttggattccaccaccttaagcattgagcaagtgattgaaaaagcgctacaatacgcgcgccagaaattggctctcgcataagcgaccgaatttgcagtacccccgttgcaatggaatgacagcgggtatgttaaacaaccccatccggcatggagccaggtggacgttaaatataaacctgaagattaaacatgactgaatcttttgctcaactctttgaagagtccttaaaagaaatcgaaacccgcccgggttctatcgttcgtggcgttgttgttgctatcgacaaagacgtagtactggttgacgctggtctgaaatctgagtccgccatcccggctgagcagttcaaaaacgcccagggcgagctggaaatccaggtaggtgacgaagttgacgttgctctggacgcagtagaagacggcttcggtgaaactctgctgtcccgtgagaaagctaaacgtcacgaagcctggatcacgctggaaaaagcttacgaagatgctgaaactgttaccggtgttatcaacggcaaagttaagggcggcttcactgttgagctgaacggtattcgtgcgttcctgccaggttctctggtagacgttcgtccggtgcgtgacactctgcacctggaaggcaaagagcttgaatttaaagtaatcaagctggatcagaagcgcaacaacgttgttgtttctcgtcgtgccgttatcgaatccgaaaacagcgcagagcgcgatcagctgctggaaaacctgcaggaaggcatggaagttaaaggtatcgttaagaacctcactgactacggtgcattcgttgatctgggcggcgttgacggcctgctgcacatcactgacatggcctggaaacgcgttaagcatccgagcgaaatcgtcaacgtgggcgacgaaatcactgttaaagtgctgaagttcgaccgcgaacgtacccgtgtatccctgggcctgaaacagctgggcgaagatccgtgggtagctatcgctaaacgttatccggaaggtaccaaactgactggtcgcgtgaccaacctgaccgactacggctgcttcgttgaaatcgaagaaggcgttgaaggcctggtacacgtttccgaaatggactggaccaacaaaaacatccacccgtccaaagttgttaacgttggcgatgtagtggaagttatggttctggatatcgacgaagaacgtcgtcgtatctccctgggtctgaaacagtgcaaagctaacccgtggcagcagttcgcggaaacccacaacaagggcgaccgtgttgaaggtaaaatcaagtctatcactgacttcggtatcttcatcggcttggacggcggcatcgacggcctggttcacctgtctgacatctcctggaacgttgcaggcgaagaagcagttcgtgaatacaaaaaaggcgacgaaatcgctgcagttgttctgcaggttgacgcagaacgtgaacgtatctccctgggcgttaaacagctcgcagaagatccgttcaacaactgggttgctctgaacaagaaaggcgctatcgtaaccggtaaagtaactgcagttgacgctaaaggcgcaaccgtagaactggctgacggcgttgaaggttacctgcgtgcttctgaagcatcccgtgaccgcgttgaagacgctaccctggttctgagcgttggcgacgaagttgaagctaaattcaccggcgttgatcgtaaaaaccgcgcaatcagcctgtctgttcgtgcgaaagacgaagctgacgagaaagatgcaatcgcaactgttaacaaacaggaagatgcaaacttctccaacaacgcaatggctgaagctttcaaagcagctaaaggcgagtaattctctgactcttcgggatttttattccgaagtttgttgagtttacttgacagattgcaggtttcgtcctgtaatcaagcactaagggcggctacggccgcccttaatcaatgcagcaacagcagccgcttaatttgcctttaaggaaccggaggaatcatgaccaagagtgaattgatagaaagacttgccacccagcaaagccacattcccgccaagacggttgaagatgcagtaaaagagatgctggagcatatggccagcactcttgcgcagggcgagcgtattgaaatccgcggtttcggcagtttctctttgcactaccgcgcaccacgtaccggacgtaatccgaagactggcgataaagtagaactggaaggaaaatacgttcctcactttaaacttggtaaagaactgcgcgatcgcgccaatatttacggttaagttttttactcaaacttgaacgagagaaaagcacctgtcgggtgcttttttcatttctctaatctggaactggaagctgcctcgcagagttttgaacagttttcaccctttcgttaaattcttctgaatatgcctcggggaacgcaaaattcccaccagacaaccgctcaacaaagttgcacactttccataaacagggaggggtgcatgaaaataacgacagtcggtgtatgcataattagcggaatttttccgttgctgattttgccccaattgcctgggacattaacccttgcgtttctgactctcttcgcctgcgtactggcatttatccctgttaaaaccgtccgttatatcgcgctgacgttgctgtttttcgtttggggcatattaagtgcaaagcaaattttgtgggcaggagaaaccttaactggcgcgacgcaggatgcaattgttgagatcactgcaactgacggcatgaccactcattacggtcaaattactcatctacaaggtcgacgtatattccctgcgagtggtctcgtgatgtatggcgaatatcttccgcaagcggtttgtgctggacaacaatggagtatgaaactcaaagttcgtgcagttcatggccaacttaatgatggcggctttgatagccagcgttatgccattgcccagcatcagccgctcaccggccgttttctgcaggcaagtgtcattgaaccgaattgtagcctgcgtgcacagtatctggcgagtctacaaacaacgctgcaaccctatccgtggaatgcggttattcttggtttaggtatgggggaacggttatccgtccccaaagaaatcaaaaatatcatgcgcgatactggaacggcgcatttaatggcgataagcggattgcacatcgcttttgcggcgttgctggctgccggactcattcgcagtggacaaatttttctgcctgggcgctggatccactggcaaataccattaattggcggaatctgctgtgctgctttttatgcctggttgacgggaatgcaacctcctgcattgcgtaccatggtggcgcttgctacgtggggaatgcttaagttaagtgggcgacagtggagtggctgggatgtatggatatgttgtctggcggcaattttgctgatggatcctgttgccattctcagccaaagtttatggctctctgccgctgcggtcgcggcattgatattttggtatcagtggcttccctgtcctgagtggcaactgccgccggtattgcgtgcagttgtttccctcatccatctgcaactgggaatcacacttctgcttatgcccgtgcaaatcgtcatatttcatggcattagtctgaccagctttattgcaaatctattagcaattcccttggtgacatttatcacggttccgttgatcctcgccgcgatggttgtgcatttaagcgggccgttaatcctggagcaagggttatggtttcttgccgaccggtctttggctttacttttctgggggttaaagagtttgccggaagggtggatcaacattgctgaatgttggcaatggctaagtttttccccatggttcttactggtggtatggcgattaaacgcctggcgaacgttgccagcaatgtgtgtggctggaggcttgctgatgtgctggccgctgtggcaaaaacctcgacctgacgagtggcagctgtacatgcttgatgtcgggcaagggctggcaatggtgatagccagaaacggcaaagcgattctctatgacacaggactggcctggcctgaaggggatagtgggcaacaactgattatcccctggctccactggcataatcttgaaccggaaggcgttattctgagccatgaacatctggatcaccggggagggctggatagtatattgcatatatggccgatgttatggatcagaagtccgttaaactgggaacatcatcagccctgtgtgcgtggcgaagcgtggcaatggcaaggattgcgtttcagcgcgcactggcctttacaaggtagcaacgataaaggaaataaccattcctgtgtggttaaggttgatgacgggacgaatagcattcttctaaccggtgatattgaagccccagctgaacaaaagatgctaagccgttactggcagcaagtgcaggcaacattgcttcaggtacctcaccatggcagtaataccagtagtagcttgccattaattcagcgagtgaatggaaaagtggcactcgcaagcgcaagccgctataacgcatggcgactgccctctaacaaagttaagcatcgctatcaactgcaaggatatcaatggattgatactccacatcaaggtcaaacaacggtcaattttagtgcgcaaggctggcggattagcagcctcagggagcaaattttacctcgttggtatcatcagtggtttggcgtgccagtggataacgggtaaaatatgcggctatttcaacaaatgctggttttttgaatgcataacgacaaagatctctctacgtggcagacattccgccgactgtggccaaccattgcgcctttcaaagcgggtctgatcgtggcgggcgtagcgttaatcctcaacgcagccagcgataccttcatgttaagcctccttaagccacttcttgatgatggctttggtaaaacagatcgctccgtgctggtgtggatgccgctggtggtgatcgggctgatgattttacgtggtatcaccagctatgtctccagctactgtatctcctgggtaagtggaaaggtggtaatgaccatgcgtcgccgcctgtttggtcacatgatgggaatgccagttagtttctttgacaaacagagtacgggtacgctgttgagtcgtattacctacgattccgaacaggttgcttcttcttcttccggcgcactgattactgttgtgcgtgaaggtgcgagcatcatcggcctgttcatcatgatgttctattacagttggcaactgagcatcattttgattgtgctggcaccgattgttagcattgcgattcgcgttgtaagcaagcgttttcgcaacatcagtaaaaacatgcagaacaccatggggcaggtgaccaccagcgcagaacaaatgctgaagggccacaaagaagtattgattttcggtggtcaggaagtggaaacgaaacgctttgataaagtcagcaaccgaatgcgtcttcaggggatgaaaatggttagtgcctcttccatctctgatccgatcattcagctgatcgcctctttggcgctggcgtttgttctgtatgcggcgagcttcccaagtgtcatggatagcctgactgccggtacgattaccgttgttttctctagtatgattgcactgatgcgtccgctgaaaagcctgaccaacgttaacgcccagttccagcgcggtatggcggcttgtcagacgctgtttaccattctggacagtgagcaggagaaagatgaaggtaagcgcgtgatcgagcgtgcgactggcgacgtggaattccgcaatgtcacctttacttatccgggacgtgacgtacctgcattgcgtaacatcaacctgaaaattccggcagggaagacggttgctctggttggacgctctggtagcggtaaaagtaccatcgccagcctgatcacgcgtttttacgatattgatgaaggcgaaatcctgatggatggtcacgatctgcgcgagtataccctggcgagcttacgtaaccaggttgctctggtgagccagaatgtccatctgtttaacgatacggttgctaacaacattgcttacgcacggactgaacagtacagccgtgagcaaattgaagaagcggcgcgtatggcctacgccatggacttcatcaataagatggataacggtctcgatacagtgattggtgaaaacggcgtgctgctctctggcggtcagcgtcagcgtattgctatcgctcgagccttgttgcgtgatagcccgattctgattctggacgaagctaccagcgctctggataccgaatccgaacgtgcgattcaggcggcactggatgagttgcagaaaaaccgtacctctctggtgattgcccaccgcttgtctaccattgaaaaggcagacgaaatcgtggtcgtcgaggatggtgtcattgtggaacgcggtacgcataacgatttgcttgagcaccgcggcgtttacgcgcaacttcacaaaatgcagtttggccaatgatcgaaaaaatctggtctggtgaatcccctttgtggcggctattgctgccactctcctggttgtatggcctggtgagtggcgcgatccgtctttgctataaactaaaactgaagcgcgcctggcgtgcccccgtaccggttgtcgtggttggtaatctcaccgcaggcggcaacggaaaaaccccggtcgttgtctggctggtggaacagttgcaacagcgcggtattcgcgtgggggtcgtaagccggggatatggtggtaaggctgaatcttatccgctgttattgagcgcagataccacaacagcacaggcgggtgatgaacctgtgttgatttatcaacgcactgatgcgcctgttgcggtttctcccgttcgttctgatgcggtaaaagccattctggcgcaacaccctgatgtgcagatcatcgtaaccgacgacggtttacagcattaccgtctggcgcgtgatgtggaaattgtcgttattgatggtgtgcgtcgctttggcaatggctggtggttgccggcggggccaatgcgtgagcgagcggggcgcttaaagagcgttgatgcggtaatcgtcaacggcggtgtccctcgcagcggtgaaatccccatgcatctgctgccgggtcaggcggtgaatttacgtaccggtacgcgttgtgacgttgctcagcttgaacatgtagtggcgatggcggggattgggcatccgccgcgcttttttgccacgctgaagatgtgtggcgtacaaccggaaaaatgtgtaccgctggccgatcatcagtctttgaaccatgcggatgtcagtgcgttggtaagcgccgggcaaacgctggtaatgactgaaaaagatgcggtgaaatgccgggcctttgcagaagaaaattggtggtatttgcctgtagacgcacagcttagtggtgatgaaccagcgaaactgcttacgcaactaaccttgctggcttctggcaactaattacgccgcggcagcgttcgattgatggagtcatgaatgagcctgccgcacctctcccttgctgatgcgcgtaatcttcaccttgccgcacaaggcctgttaaacaaaccccgccgtcgagcgagcttggaggatattccggcaacgatctcccgcatgtccttgctgcaaatcgataccatcaatattgttgcccgtagtccatatctggtgcttttcagtcgtctgggaaattatcctgcccagtggctggatgagtctctggcgcgtggcgaattaatggaatactgggcgcatgaagcctgctttatgccgcgtagcgactttcgtcttattcgccaccgcatgctggcacctgaaaaaatgggctggaaatacaaagacgcctggatgcaggaacatgaggcggaaattgcacagttaattcagcatattcatgataaggggccggtacgtagtgccgattttgagcatcctcgtaaaggtgcaagcggctggtgggaatggaagccgcataaacggcatctggaaggtttatttactgccggaaaggtgatggtgattgaacggcgcaacttccagcgcgtttatgatttaacccaccgtgtcatgcctgactgggatgatgagcgcgatctcgttagccaaacagaagcagaaatcatcatgctggataacagtgcgcgtagcctgggaatattccgcgaacagtggctggcagattactatcggctgaaacgtccggcactggcggcgtggcgcgaagcgagggctgaacagcagcaaatcattgctgtgcatgttgaaaaattgggcaatctttggctgcatgatgatttgctgccgctactcgagcgagcgctggccggaaagctcactgcaacgcacagcgcggtacttagcccttttgatcctgttgtctgggatcgcaaacgcgcagagcagctttttgattttagctaccggctggagtgctataccccagcgccgaaacgccagtatggctattttgttctgccgttattacatcgtgggcaattagttgggcgaatggatgccaaaatgcatcgccagacaggcatccttgaagttatctctctgtggttacaggaaggtattaaaccaacgacaacgctgcaaaaagggctacgtcaggcgattactgatttcgctaactggcagcaggcaacgcgggtgacattaggatgctgcccgcaaggcctctttactgattgccgcaccggctgggaaatagaccccgtcgcataaatgattatgataagatttatgcattcataacccgatccatctggaggaactatggatcatcgtctgcttgaaatcattgcctgcccggtttgcaacggaaaactttggtataaccaggaaaaacaagagcttatttgcaaactggacaacctcgctttcccgctgcgtgatggcattccagtgttgctggaaacggaagcccgcgtgctgactgctgatgagagtaaaagttgatgtaaactgctgatgagagtaaatcatgagttttgtggtcattattcccgcgcgctacgcgtccacgcgtctgcccggtaaaccattggttgatattaacggcaaacccatgattgttcatgttcttgaacgcgcgcgtgaaagtggtgccgagcgcatcatcgtggcaaccgatcatgaggatgttgcccgcgccgttgaagccgctggcggtgaagtatgtatgacgcgcgccgatcatcagagtggaacagaacgtctggcggaagttgtcgaaaaatgcgcattcagcgacgacacggtgatcgttaatgtgcagggtgatgaaccgatgatccctgcgacaatcattcgtcaggttgctgataacctcgctcagcgtcaggtgggtatggcgactctggcggtgccaatccacaatgcggaagaagcgtttaacccgaatgcggtgaaagtggttctcgacgctgaagggtatgcactgtacttctctcgcgccaccattccttgggatcgtgatcgttttgcagaaggccttgaaaccgttggcgataacttcctgcgtcatcttggtatttatggctaccgtgcaggctttatccgtcgttacgtcaactggcagccaagtccgttagaacacatcgaaatgttagagcagcttcgtgttctgtggtacggcgaaaaaatccatgttgctgttgctcaggaagttcctggcacaggtgtggatacccctgaagatcttgagcgcgttcgcgctgaaatgcgctaatttcacttcacgacacttcagccaattttgggaggagtgtcgtaccgttacgattttcctcaatttttcttttcaacaattgatctcattcaggtgacatcttttatattggcgctcattatgaaagcagtagcttttatgagggtaatctgaatggaacagctgcgtgccgaattaagccatttactgggcgaaaaactcagtcgtattgagtgcgtcaatgaaaaagcggatacggcgttgtgggctttgtatgacagccagggaaacccaatgccgttaatggcaagaagctttagtacgcccggaaaagcccgacaactggcatggaaaaccaccatgctggcaagaagtgggactgtccgtatgccgactatttatggtgtgatgacgcatgaagaacaccccggccccgatgtcctgctactggagcggatgcgtggtgttagcgtggaggcaccagcccgaacaccagaacgctgggaacaactcaaagaccaaatcgttgaagccttactggcctggcaccgtcaggacagtcgcggttgcgtcggcgcggtcgacaatactcaggaaaatttctggcccagttggtaccggcaacatgttgaagtgctatggaccacgctcaatcagttcaataacaccggtctgacgatgcaggataagcggatcctgtttcgcactcgcgaatgtctcccggcattatttgaaggctttaacgacaattgtgtgctgattcacggtaacttctgtttacgcagcatgttgaaagatagccgcagcgatcagttactggcgatggtcgggccgggactaatgctttgggcaccgcgagaatacgaactgttccgactaatggataattctctggcggaagatttgctctggagttacctgcaacgcgcgccagtggcggagagcttcatctggcggcgttggttgtatgtgttatgggatgaagttgcgcaactggttaataccggacgatttagtcggcgcaacttcgatctggcaagtaaaagtctcttgccgtggctcgcctgatcactcttgccgtggctcgccactgctaccttttagccactgccagatacggccaagcgtttcatagccaacacgatcgctatgcatcaaccagaccggagaagggattgcccgttcccacgggttaagcgggctgtcgatggccaactgattcgccggggctggtagcggatttaacccttcctgctgaaaaaagatcatcgcccgcggcagatgacttgcggaggtcaccagcaggaaaggggcgtcaccaatcgcctgtttcactgctgcagcttcttcttcggtatcttttggcaaatccagggtgataatttgctcgcgcggcacgcccaggctttgcgcaactctggcacctacttccgctgtactcaccgtattggtttttgctacgcctcccgtgaagatcagtttacttcccggattttcgcgccataagcgaataccttcattcaggcgtggcagactgttattgattaaattagagctcggtgcccactgcgggttccaggtataaccacctccgagcaccacgatatagtccactttttggctattattccatgtcggataggtgctttcgatgggacgcagcaggcggtcggctaccggttgcaaactcaataacaagagcgccagccacccaatgctaataaaaatcttcccggttttttgaaaacggctaaaccacagcagcgccaggccagcgccaataatcaacaacatcagcggaagtggcagcaacatattgccaatcacttttttcagtgtaaaaagcatcctttctggttccttttttaaccatatagcaagggatcgccagcgatattacaccagacgggttcattctcgccgtggctgtgacaaaatagcgtctttatcagaaaacgtcttagccaaccggtggagaaagcaatgcaggatcgcaattttgatgatattgcggaaaagttttcccgtaacatttacggcaccaccaaagggcagcttcgacaggctattctgtggcaggatctcgatcgcgtgctggcggaaatgggcccgcaaaaactgcgtgtgctggatgctggcggtggagaagggcagaccgcaatcaaaatggccgagcgtgggcatcaggtcattttatgcgatctttctgcgcagatgatcgaccgcgcaaaacaggcggcagaagcaaaaggtgtgagcgacaacatgcaatttatacattgcgccgctcaggatgttgctagccatttggaaacgcccgttgatctgatattgttccatgcggtgctcgagtgggtggctgatccccgcagcgtattgcagaccctctggagtgtgttgcgtccaggcggcgtgttgagcttaatgttctacaatgcgcatggtttgttgatgcataacatggtcgccgggaattttgattacgtgcaggcgggaatgccgaaaaagaaaaaacggacgcttagcccagattatccacgcgacccggcgcaggtttatctgtggctggaagaagctggttggcaaattatgggtaagacaggcgttcgcgtgtttcatgattatctgcgcgagaaacaccagcagcgcgactgctatgaagcattacttgaattagaaacgcgttattgccgtcaggaaccgtatattaccctggggcgttatattcatgtcaccgcgcgcaaaccgcagagcaaggataaagtatgagtgaattttcccagacagtccccgaactggttgcctgggccagaaaaaatgacttctccatcagcctgccggtagaccgactctcttttctgctggcggttgccacgctgaacggcgagcgtctggatggtgagatgagtgaaggcgagctggtggatgcattccgccatgtgagtgatgcgtttgagcaaaccagcgaaaccatcggcgtgcgcgccaataacgcgatcaacgacatggtgcgtcaacgtctgctgaaccgctttaccagcgagcaggcggaagggaacgcaatttaccgtctgacgccgctcggcatcggcattactgactactacatccgtcagcgcgagttttctacgctgcgtctttctatgcagttgagcattgtggcgggtgagctcaaacgcgcagcagatgccgccgaagagggcggtgatgaatttcactggcaccgtaatgtctatgcgccactgaaatatagcgtagcagaaattttcgacagtatcgacctgacgcaacgtctgatggacgaacagcagcagcaggtgaaggacgatatcgcccagttgctgaacaaagactggcgggcggcgatttccagctgtgaattgttgcttagcgaaacttccggaacgctgcgtgaattgcaggatacgctggaagcggcaggcgacaaattgcaggctaatctgttgcgcattcaggatgcgacgatgacccatgacgatctgcatttcgtcgatcgtctggtgttcgatctgcagagcaaactcgatcgtattatcagttggggccagcaatccatcgacttgtggattggctacgaccgccacgtacacaaatttattcgtaccgcgatcgatatggataaaaaccgcgtctttgctcagcggttacgtcagagcgtacaaacctattttgatgagccgtgggcgctaacttatgccaatgccgatcgtctgctggatatgcgtgacgaagagatggcactgcgcgatgaagaagtgactggggaacttcctgaggatctggaatacgaagagtttaacgagatccgcgaacagctggcggcgatcatcgaagaacaacttgccgtgtacaaaaccagacaagtgccgctggatcttggtctggtggtacgcgaatatctgagtcagtatccgcgtgcacgtcactttgacgttgcgcgtattgttattgatcaggcggtacgtcttggcgtagcgcaagcagatttcaccggactgccagcgaaatggcagccgattaatgattacggagccaaggtacaggcgcatgtcatcgacaaatattgaacaagtgatgccggttaagctggcgcaggcgctggcgaatccgttatttccggcgctggacagcgccttacgtagtggacgccatattggcctcgacgaactggataatcatgcattcctgatggattttcaggaatatctggaagagttttacgcgcgttataacgttgagcttattcgcgcaccagaagggttcttctatttacgcccacgttccaccacgctgatccctcgttccgtcttgagcgaactggatatgatggtcgggaaaatcctctgttatctctatctcagcccggaacggctggcgaatgaggggattttcacccagcaggaactgtacgacgaactgctcaccctggccgatgaagcaaaactgctgaaactggtgaacaaccgtagtaccggtagtgacgttgaccgtcagaagttgcaggagaaagtacgttctagcctcaaccgtctgcgtcgtttaggcatggtgtggtttatgggccacgacagcagcaagtttcgcattaccgaaagcgtgttccgcttcggagccgatgtgcgtgctggcgacgatccccgtgaagcacagcgtcgcctgattcgtgatggcgaagcaatgccgattgaaaatcatctgcaactcaacgatgaaaccgaagagaatcagccagatagcggagaggaagaataatgattgaacgcggtaaatttcgcagtctgacgctgattaactggaacggcttttttgcccgaacttttgaccttgacgagctggtcacgacgctttctggcggtaacggggcgggtaaatccaccaccatggcggcgttcgttacggcgctgatccccgacctgaccctgctgcatttccgtaacactacggaagccggggccaccagcggtagccgcgataaaggtctgcacggtaagctgaaagcgggtgtctgttatagcatgctcgacaccattaacagccgccaccagcgcgtggtggtcggtgtgcgtctgcaacaggttgccggacgcgatcgtaaagtggatatcaagccgtttgccattcagggactgccgatgagcgtgcagccgacacagctggtgaccgaaaccctgaacgaacgccaggcgcgcgtgctgccgcttaacgagctgaaagacaagctcgaggcgatggaaggcgtgcagtttaaacagttcaactccattactgattaccacagcctgatgttcgatctgggcatcatcgcgcgtcgtctgcgctccgcatctgaccgtagcaaattctatcgtctgatcgaagctagcctgtatggcgggatctccagtgccattacccgttctctgcgcgactacctgttgccagaaaacagcggcgtgcgtaaagcgttccaggacatggaagcggcgctgcgtgaaaaccgtatgacgctggaagcgattcgtgtcacccagagcgaccgcgacctgtttaagcatctgatcagcgaagccaccaactacgtggcggcggactacatgcgtcacgccaacgagcgccgtgtccatctcgacaaagccctggagtttcgtcgcgagctacatactagccgtcagcaactggcggctgagcagtacaaacacgtcgatatggcgcgtgagctggcagagcacaacggtgccgaaggcgatctggaagcggattatcaggcggccagtgatcacctgaacctggtgcaaaccgcactgcgtcagcaggagaagatcgaacgctacgaagcggatctcgatgagctgcagatccgtctggaagagcaaaatgaagtggtggcagaagccatcgaacgccagcaagagaatgaggctcgtgcggaagctgccgaactggaagtggacgagctgaaaagccagcttgctgactaccagcaggcgctggacgtccagcaaacgcgcgcgatccagtataaccaggcgattgctgcgcttaatcgtgccaaagaactgtgccatctgccggacttaaccgccgactgcgccgccgaatggctggaaaccttccaggcgaaagagctggaagcgactgaaaaaatgctctctcttgagcagaaaatgagcatggcgcaaaccgcgcacagccagtttgagcaggcttatcagctggtggtggcaatcaacggcccactggcgcgtaacgaggcgtgggatgtcgctcgcgaactattgcgcgaaggggtcgatcagcgtcacctggcagagcaggttcagccgctgcggatgcgattaagcgaactggaacagcgtctacgcgagcagcaagaagctgagcgtctgctggcagatttctgcaaacgtcagggcaagaattttgatatcgacgaactggaagccctgcatcaggaactggaagcacgcattgcctctctttccgatagcgtgtctaacgcccgtgaagagcgcatggcactgcgccaggagcaggaacagctgcagtctcgcattcagagtttgatgcagcgtgcgccggtttggctggcagcgcaaaacagtctcaaccagttgagcgaacagtgcggcgaagagtttacctccagccaggacgtcaccgaatatctgcaacagttgctggagcgtgagcgagaggcgattgttgaacgcgatgaagtgggcgcgcgcaaaaacgccgtcgatgaagagatcgaacgtttaagccagcctggcggctctgaagatcagcgtctgaacgcgctggcggagcgttttggtggtgtgctgctgagtgaaatttatgacgacgttagcctggaagatgcgccgtacttcagtgcgctgtatggcccgagtcgccacgccatcgtggtgccagatctgagtcaggtaactgaacacctggaaggcttgaccgattgcccggaagatctctatctgatcgaaggagatccgcagagtttcgatgacagcgtgttcagcgttgatgagctggaaaaagcggtagtggtgaaaatcgccgatcgtcagtggcgttatagtcgtttcccggaagtgccgctgtttggtcgtgctgcgcgtgaaagccgtattgaaagcctccatgccgagcgtgaagtgctttccgaacgcttcgccacgctctcctttgatgtacagaaaactcagcgtctgcatcaggcgttcagccgctttatcggcagtcatctggcggttgcgtttgagtctgacccggaagcagaaatccgtcaactgaacagccgtcgcgtcgaactggagcgggcgttaagtaatcatgaaaatgataaccagcagcagcgtattcagtttgagcaggcgaaagagggcgttacggcgctgaaccgcattctgccgcgtctcaacctgttggctgatgacagcctggcggatcgcgtcgatgaaatccgcgaacgtctggatgaagcccaggaagccgcgcgttttgttcagcagtttggcaatcaactggcgaaactggaaccgattgttagcgtattgcagagcgacccggaacagttcgaacagttaaaagaagattacgcgtactctcagcagatgcagcgcgatgcccgtcagcaggcgtttgccctgacggaagtggtgcagcgtcgtgcgcactttagctattctgacagcgcagaaatgcttagcggtaacagcgatctcaacgaaaaactgcgtgaacgtctggaacaggcggaagcggagcgtacccgcgctcgcgaagcgttgcgcggtcacgcagcgcagttgagtcagtacaaccaggtgctggctagcctgaaaagttcttacgacaccaaaaaagagctactcaacgatctgcaacgtgaattgcaggatatcggcgtgcgtgctgatagcggggcagaagagcgggcgcgtattcgccgtgacgagctgcatgcgcaactgagcaataaccgtagtcgccgcaatcaactggaaaaagcgcttaccttctgcgaagcggagatggacaacctgacccgcaaactgcgcaagctggagcgggattactttgagatgcgcgagcaggtagtgaccgccaaagcgggctggtgtgcggtgatgcgcatggtgaaagataacggcgttgagcgccgcttacaccgtcgtgagctggcttatctctccgctgatgatttgcgttccatgagcgataaggcgttaggtgcgctgcgtctggcggtggcggataacgaacatctgcgcgacgtgctgcgcatgagcgaagatccgaaacgtccggagcgtaaaattcagttcttcgtggcggtttatcagcatctgcgtgaacgtattcgtcaggatattattcgtaccgatgatccggtggaagctatcgaacagatggagattgaacttagccgtctgaccgaagaattaacctcccgtgaacagaaactggcgatcagttcccgcagcgtggcgaacatcattcgcaaaaccattcagcgcgagcagaaccgtatccgtatgctcaaccaggggttgcagaacgtaagctttggtcaggtgaacagcgtgcgtctcaacgtgaacgtgcgtgaaacgcacgccatgctactggatgtgctctctgaacagcacgagcagcatcaggatctgtttaacagcaaccgtttgaccttcagcgaagcgctggcgaaactgtatcaacgtcttaacccgcagattgatatggggcagcgcacgccgcagaccatcggtgaagaactgctggattaccgcaactatctggaaatggaagttgaggttaaccgtggttccgatggctggctgcgcgcagagtctggtgcattgagcaccggtgaggcgattggtaccggtatgagcattctggtgatggtggtacaaagctgggaagatgaatctcgccgcctgcgcggtaaagatatctctccttgccgcctgctgttcctcgatgaagcagcgcgactggatgctcgttctatcgccacgctgtttgaattgtgtgagcgtttgcaaatgcaactcatcatcgcagcgccggaaaatatcagcccggagaaaggcaccacctataaactggtgcgtaaagtcttccagaataccgaacacgttcatgtcgtcggcctgcgaggatttgcgccgcaactccctgaaacgcttccaggaactgacgaagcgccttctcaggcgagttaaaattaaggcggcagcaatgccgccttttctttttccgaaaactccgtttctgcactaaaaaagtggcacattacggcgcgcttttctttaaacttctttacattaggttatgtaaaaacgtatcggcgtttatatactgaagataagcctgatgagtaacaggcttgctcgtcatactttcgtgagtattggcgttgtacaggcaagtcgtaaaataacagcctggctattcagagtatgataaaaacagggggcaagggatgttgcttaatatgatgtgtggtcgtcagctgagcgcaatcagtttgtgcctggccgtaacattcgctccactgttcaatgcgcaggccgatgagcctgaagtaatccctggcgacagcccggtggctgtcagtgaacagggcgaggcactgccgcaggcgcaagccacggcaataatggcggggatccagccattgcctgaaggtgcggcagaaaaagcccgcacgcaaatcgaatctcaattacccgcaggttacaagccggtttatcttaaccagcttcaactgttgtatgccgcacgcgatatgcaacccatgtgggaaaaccgtgatgctgttaaagccttccagcaacagctggcagaggtggcgattgccggtttccagccgcagtttaataaatgggtagagttactgaccgatcctggtgttaacgggatggcacgcgacgtggtgctctctgatgcgatgatgggctatctccatttcattgcaaatattccggtcaaaggcactcgctggctatatagcagtaaaccttatgcacttgcaacgccgccgctcagcgtgattaaccaatggcagctggcgctggataaaggtcaattgcctacgtttgttgcaggactggcaccgcagcatccgcaatatgcggcgatgcatgaaagcttactggccttactctgtgacaccaaaccgtggccccaactgaccggcaaagcaacgttgcgcccagggcagtggagtaacgacgtaccggcgttgcgcgaaatattgcaacgcacaggcatgttggacggggggccgaaaattactctacctggcgatgacacgccaactgacgcggtagtcagcccatccgctgttactgttgaaacagcagaaactaagccgatggataagcaaacgacgtctcgtagtaaacctgcgcctgccgttcgcgccgcctacgataatgaactggtggaagccgttaaacgttttcaggcatggcaaggattgggggcagatggtgctattggcccggcaacacgtgactggttaaacgtaacgcccgcccagcgtgctggtgtgttggctctcaacatccagcgattgcgcttgctgccaacagagctttctaccgggatcatggttaacattccggcctatagcctggtctactatcagaacggcaatcaggtgctggatagccgagtcattgtcggtcgccccgatcgcaaaacgccgatgatgagcagtgcccttaacaacgtagtggtaaacccgccgtggaacgtacctccaactctggcacgcaaagatattctgccaaaagtgcgcaacgatccgggatatctcgaaagccatggctatacggtgatgcgcggctggaacagcagagaagcgattgacccatggcaggttgactggtctacaatcacggccagcaatttaccgttccgcttccagcaggctccaggcccacggaacagcctggggcgctataaattcaatatgccgagtagtgaggccatttatttgcatgacacgccgaaccacaatctgttcaagcgtgatacacgcgcattgagcagtggctgtgtacgagtgaataaagcttccgatctggcgaatatgctgttgcaggatgcaggctggaatgacaaacgtatttctgatgcgctgaagcagggtgatacacgttacgtcaatattcggcagagcattccggtgaatctctactacctgacggcctttgttggtgcagatggtcgtacccagtatcgtacagatatttacaattatgatctgcctgcgcgatccagcagccaaatcgtaagcaaagcggaacaattaatcaggtaaatgaagtagttcggggaaatcagttgtcgtaataattagcatgattgggggcgattctctgcagcccccgtcactgctggggttgagtcatcttgacgtctgctttacgggcggttaaggtgcctcttgtgcgccagaagtgcatataaacgataacattgacctgtagacttgattatcatggacaaattcgacgctaatcgccgcaaattgctggcgcttggtggcgttgcactcggtgccgccatcctgccgacccctgcgtttgcaacactctctaccccacgcccgcgcattttgacactcaataatcttcataccggagagagtatcaaagcggagtttttcgatggcagaggctatattcaggaagaattggcaaaacttaaccattttttccgcgattaccgcgcgaacaaaataaagtccatcgacccaggattattcgaccagttgtatcgcctgcaagggttgttaggcacgcgcaaaccggtgcaactcatttccggttatcgttctattgataccaacaatgaactacgcgcccgcagccgtggagtagcgaagaaaagctatcacactaaaggccaggcgatggatttccatattgaaggtatcgcgttaagcaatattcgcaaagccgcgttatctatgcgcgcaggtggtgtaggatattatccacgtagtaactttgtgcatattgataccgggccagcacggcactggtaataattgcttaacgaaacaggggcagtatgaactatcgtattattccggtcaccgcattctcccagaactgtagtttaatctggtgtgaacaaacccgtctggccgcactggtcgatcctggcggcgatgcggaaaaaatcaaacaggaagttgatgacagcggcctgacactgatgcagatcctgctgacgcatggtcatctggaccacgttggcgcagcggcggaactggcgcaacattacggcgtgccggttttcggcccggaaaaagaagatgagttctggctgcaaggcttgcctgcgcaaagtcgtatgtttggtctggaagagtgccagccgctgacgccagatcgttggctgaacgaaggcgataccatcagcatagggaatgtgactttacaggtgttacattgccctgggcatacgccgggtcatgtcgtgttttttgatgatcgggcaaagctgctgatttctggcgatgttattttcaaaggcggagtagggcgcagtgacttcccgcgtggcgatcataatcaactgatttctagtatcaaagataaattgctgccactgggggatgacgtgatatttattccgggtcacggaccattatccacacttggttatgaacgcctgcataatcccttcctgcaagacgaaatgcccgtctggtaaggcacataaaaaagcccgcttttaatgctggcctggatttctggcaaagtgcgctttgtttatgccggatgcggcacgagcgccttatccggcctacaaaatcgtgcaaattcaaaatattgcaggggacgcgtaggcctgataagcgtagcgcatcaggcaatgttgcgtttgtcatcagtctcagcccgcttttcagcgggcttcattgtttttaatgcttacagcactgccacaatcgcttcgcacagcggagccatgttatctggtgtcatcccggccacatttacgcgaccagaagcaaccgcatatacgccaaactcttcgcgcagacgcagcacttgttcttttgtcaggccactgaaggagaacatgccgttctgtttgatgataaagctgaagtcgcggtttgcgcctttttcctgcagcgtattgacgaacaactgacgcatacgctgaatacgctggcgcatatcagtcagctcttgttcccaaatcgcacgtaacgcatcgttgctcaggatggtggcaacaacagaagcgccgtgtgctggtgggttagagtagttagcgcgaatcgccgctttcatttggctgaatgcgcgatcaacggtttcactgtcggcagcaaccagagtacaagcgccaacacgctcgttgtacaggccaaagtttttagagtaggaactggcaacaatcagctctttatgcatagccgcgaaagcgcgcagtccttcagcatcttcttccagaccacgggcaaaaccctggtaagcgaagtcaaacagcggtaaccagcctttctcaacggagagttgtgccagtgtttgccattgttccagcgtagggtcgataccggttgggttatggcagcagccatggaacagcactacgtcgccagcctgagcttcattcaggctgttaatcagtgcatcgaagtcaagagtgtgattttccgcatcataataagcgtattcacgaacttccagacctgcagagttaaagacgctcttatggttcggccagcttgggttgctcacccacacacgcttaacgctggtattttttgccaggaaatcggcagccacgcgtagtgcgccagtgccccccggagtctgtgccgtgcgagcacgtttgtcattgatcagggcgctacctttaccaaacagcagttcctgagtgcagcgaccaaattcagggatgccgtcaatgccgaggtaatttttggtggtttcattttcgagcagatactgttcagcctttttcacgctggtcagtaccggggttttgcccgtctcatctttatagacaccaatcccgaggttaattttgccgggacgttcatcggcacgaaacagatcggccaggcccagaatcgggtcggcaggagcggcggtaatgttctcaaacatgacgaggttccattatggttacagaagggaagtccgctatcagggtaacgggagatttacaaaattccaactattactgatgaaaacgcaggctgtttttgcaagacgtgagattgctctggaaggtataaaaaaaacaggaccaaagtcctgttttttcggcatttaacaaagaggtgtgctattagaactggtaaacgatacccacagcaacggtgtcgtcactacctacgcccagtttgttgtcagaatcgatctggttgatgatgtagtcaacataggtggacatgtttttgttgaagtagtaggttgcgcccacttcaaagtagttcaccagatcaacatcaccgataccttctacgtctttcgctttagatttggtgtaagcgatggacggacgcagaccgaaatcgaactggtattgcgcaactaacagaacgtcttgcgttttgttggcgaagccgctggtgtttgtaaatttattagtgatcggcgtagcgttacgggtttcaccgtagttcgctgccaggtagatgttgttcgcgtcgtacttcagaccagtagcccactgttcagcttttttaccgttgccaagaggttgagcttcttgcaggttggtacggtcagctgcaccataagcaccaacgataccaaagccttcgtattcgtagctgatagaaccgccaacaccgtcgccgttagaacggcgtgcagtgtcacgctcgtttttacccaggtactgaacagcgaagttcaggccatcaaccagaccaaagaagttggagttacgataggtagcaacgccgccaacacgaccaacgaagaagtcatcgctgtatgcagtatcaccaccaaattctggcagcatatcggtgtaacccagtgcatcataaaccacaccgtagttacggccgtaatcgaaagaaccaacgtcagcgtatttaagacccgcgaatgccagacgcgttttgttaccagtttgagcgtcagcgccttcagagttgttaccctggaagttatattcccactgaccataaccggtcagatcggaattgatttgagtttcccctttaaaaccaagacgggcataggtcatgtcgccattgccaccgtaactgttttcaccgttacccttggaaaaataatgcagaccaacagctttaccgtacagatctactttgttgccatctttgttatagatttctgcagcgtttgcagtacctgctactaacagagcagggacgatcactgccagaatattgcgcttcatcattatttattaccctcatggttttttttatgacacctgccactgccgtcaataagttctgtcaataaaaatttacggaactattgatgagagtttggtgtctttatgtgtctgcaggcatctttccattcaaactaacgtttcgctaccgtgaaagtgctacaaagataaagatttggtttcaaaaagaaaaaatatgtaaccaaaagtaaaatttaaggaactttgtgaacaccgtcatatttccatagagacgtgatgatatttacagcaattttaatctatttatatgatttccttatatttaaattaactaaacggaaattttgtttctgatggaaactttatcgacctggcacaaaatcttctttcagacatccagaatgccaaaaaatagtatgaaaattgtgctattagctaagaaaaaactaatccgcaataagaatgcggattagtttttgcgcgtaaatgttgcaatgtaatattccgtaacaggatgatcgttatggcggggttgcaaatagattgcttgacttaacaaacagataacttgacagaaaagataaaaaaagagccagcgggcgctggctcttgaagacgctaaattagaagctggcgttacgcggagtacgtgggaacggaatcacatcacgtacgttttgcacgccagttacgtaagcaatcagacgttcaaaaccaagaccgaaaccactatgcggaacagtaccgtagcgacgcagatcgcgataccaccagtaatcttctttattcaggcccatttccagcatacgctcgtccagcacgtccagacgttcttcacgctgggagccaccaatgatctcaccgatgcccggagccagaacgtccatagccgcaacggttttaccgtcttcgttaaggcgcatatagaacgctttaatatctttcggatagtttttaaccactaccggtgctttaaagtgttcttccgccagataacgctcatgctcagaagagagatcgactccccagtaaaccgggttttcaaacttcctgccgcagttttcgagaatggtcactgcgtcggtataatccacctgcgcaaaatcggcttcaatgaagcgttccagacgactaacggcatctttatctacgcgttcagcgaagaatttcatgtcgtcagcgcgttcttcgagaaccgctttgaagacatatttcagcatggcttcagccagacccgcaatatcgttcaggttagcaaacgccacttccggctccagcatccagaattccgccaggtgacggctggtgttggagttttcagcacggaaagtcgggccgaaggtataaattttggacaatgcgcaagcgtaggtttcgccgttcaactggccagatacggtcaggaaagactctttaccaaagaagtctttgtcgaaatccactttgccctgatcgttacgcggcaggttttccagatccagcgtagaaacgcggaacatttcgcctgcaccttcggtatcagatgcggtaatcagactcgtactaacccagaagaatccctgctcgttaaagaagcgatgcagcgcctgcgccagcgtatggcgaacgcgcgcgacggcaccaatcaggtttgtgcgcggacgcaggtgagcgacttcacgcagatactcaatgctgtggcgttttgccgccatcgggtaagtgtctggatcttcaacccaaccagcaacttcaaccttgctggcctgaatttcaaattgttgcccctggcccgggctcgccacgactttacccgtcacaatgacgctgcagccggtggtcagacgcaggacgtcttcattgtaattgggcagagaattattgatgacagcctgtacaggatcaaagcaggaaccgtcataaacggcgaggaaggagatgccagctttactatctcggcgggtacgtacccatccgcgcacggtgacttcgctgtcaacggctacacggccctggagtacgtcggctacaggcacaacgctcataatattctctctgttaatagtcggaaaaaataaacacttgtccacccgtaaatggggggatacctatgttacctggcatctgcaatcagacaagcagaattcgcaaatgcagcgaaagatttcggaattaaaggtaaaaaaagggagccgattagctccctgatgatattaactggcttttttaatatgcggaaggtcgaacgctttgcgcagcgcccgaacaaacgctttatcatggcagatagttttgccagggctgtcagaaagtttcgccaccggtttaccgttacactctaccaacttaatgacaatattcaggggttttacctgggggatatcgcaggtcaggcgagtcccaataccaaaacttaattgcacgcgggaagagaagtggcggtatagctcaaccgctttgcgtaaatccagattgtcagagaaaaccagcgttttactctgtggatcaattcccagcttttcataatgtgcaatggctttttcaccccattcaaccgggtcgccagagtcatgacgcaggccctgataccgactagcgaactcgacaccgaaatcacgcaggaaagcatccatagtgatgcagtcggttaatgcaatgccaagttggtcgggatactcttccagccaggcagcaagtgcagctcgctggctgttggctagatccgggctgatttgctgatgtgcctggaaccattcgtgtgcctgtgttcccatcggcgtgagggaaagccgacgcgccagatcgtagttgctggtgcccacaaaccaggattcctgttgcagacgcttaacgatggtttcttgtacttcgcgagaaaaacggcgacgggtgccaaaatccatcagatggaagcggctcatatcaagaccggcggttaacgcgctgaagtcgactaatttgctttccagcgtgtcgagggcttgcgcaacgtcggcctgcggactgcgatagcgatgtaccatttcactgataaccgccagcaaaggaacttcccagaggatgacttcacgccacgggccgcttaaacgaatatccagcttgccattatcgttggacacggtgacttgttccgggttaaagcggaactcgcgtaaccagttaagatagtcggccttaaagaaaggcagggcagaaagccactgatattcatcatcctgcaggcgcaggtgctgcatcgcctgaacctgttcacgaatagcatcggcataaatacccagcagatcgtcacctcggcaacgaaactccgccgcgacatgcacatcgtaatagtgatgaaacacggcttgctgcatatgcaacttataagcatctgtatccagcaagctgtgcagaacaggagaagcgaattgtgtcataggtgcgcagtagcgtcctcgtacaggagcgtttagtacaataaacatcttcaggaactgctggagtataccttgtttcgcaatttattgaaccccgatcacaccatatgccacctttctggtcgatggcattacgcggtgtatgttataaaaatgtagcaataaaggcgtttgtacctgaaaagatgaagattctgcatagcgcgatttacgcaacaggaatagactgaacaccagactctataaaagatgctaaaggttatttatgactcaacagccacaagccaaataccgtcacgattatcgtgcgccggattaccagattactgatattgacttgacctttgacctcgacgcgcaaaagacggtcgttaccgcggtcagccaggctgtccgtcatggtgcaagtgatgctccccttcgtctcaacggcgaagacctcaaactggtttctgttcatattaatgatgagccgtggaccgcctggaaagaagaagagggcgcactggttatcagtaatttgccggagcgttttacgcttaagatcattaatgaaataagcccggcggcgaataccgcgctggaagggctttatcagagtggcgatgcgctttgcacccagtgtgaagccgaaggtttccgccatattacgtattatctcgaccgcccggacgtgctggcgcgttttaccaccaaaattattgccgataaaatcaaatatcccttcctgctttccaatggtaaccgcgttgcgcaaggcgaactggaaaacggacgccattgggtacagtggcaggacccgttcccgaaaccgtgctacctgtttgcgctggtggcaggcgactttgatgtactgcgcgatacctttaccacgcgttctggtcgcgaagtagcactggagctgtacgtcgatcgcggcaaccttgatcgcgcgccgtgggcgatgaccagcctgaaaaactccatgaaatgggatgaagaacgctttggcctggagtatgacctcgacatctatatgatcgtcgcggtggatttcttcaatatgggcgcaatggagaataaggggctgaatatctttaactccaaatatgtgctggcccgcaccgacaccgccaccgacaaagattacctcgatattgaacgcgttatcggccatgaatatttccataactggaccggtaaccgagtgacctgtcgcgactggttccagctcagcctgaaagaaggtttaaccgtcttccgcgatcaggagttcagctctgaccttggttcccgcgcagttaaccgcatcaataatgtacgcaccatgcgcggattgcagtttgcagaagacgccagcccgatggcgcacccgatccgcccggatatggtcattgagatgaacaacttctacaccctgaccgtttacgagaagggcgcggaagtgattcgcatgatccacaccctgcttggcgaagaaaacttccagaaagggatgcagctttatttcgagcgtcatgatggtagtgcagcgacctgtgacgactttgtgcaggcgatggaagatgcgagcaatgtcgatctctcccatttccgccgttggtacagccagtccggtacaccgattgtgaccgtcaaagacgactacaatccggaaaccgagcagtacaccctgaccatcagccagcgcacgccagccacgccggatcaggcagaaaaacagccgctgcatattccgtttgccatcgaactgtatgataacgaaggcaaagtgatcccgttgcagaaaggcggtcatccggtgaattccgtgctgaacgtcactcaggcggaacagacctttgtctttgataatgtctacttccagccggtgcctgcgctgctgtgcgaattctctgcgccagtgaaactggaatataagtggagcgatcagcaactgaccttcctgatgcgtcatgcgcgtaatgatttctcccgctgggatgcggcgcaaagtttgctggcaacctacatcaagctgaacgtcgcgcgtcatcagcaaggtcagccgctgtctctgccggtgcatgtggctgatgctttccgcgcggtactgcttgatgagaagattgatccagcgctggcggcagaaatcctgacgctgccttctgtcaatgaaatggctgaattgttcgatatcatcgacccgattgctattgccgaagtacgcgaagcactcactcgtactctggcgactgaactggcggatgagctactggctatttacaacgcgaattaccagagcgagtaccgtgttgagcatgaagatattgcaaaacgcactctgcgtaatgcctgcctgcgtttcctcgcttttggtgaaacgcatctggctgatgtgctggtgagcaagcagttccacgaagcaaacaatatgactgatgcgctggcggcgctttctgcggcggttgccgcacagctgccttgccgtgacgcgctgatgcaggagtacgacgacaagtggcatcagaacggtctggtgatggataaatggtttatcctgcaagccaccagcccggcggcgaatgtgctggagacggtgcgcggcctgttgcagcatcgcagttttaccatgagcaacccgaaccgtattcgtagcttgattggcgcgtttgcgggcagcaatccggcagcgttccatgccgaagatggcagcggttacctgttcctggtggaaatgcttaccgacctcaacagccgtaacccgcaggtggctagtcgtctgattgaaccgctgattcgcctgaaacgttacgatgccaaacgtcaggagaaaatgcgcgcggcgctggaacagttgaaagggctggaaaatctctctggcgatctgtacgagaagataactaaagcactggcttgataaataaccgaatggcggcaatagcgccgccattcggggaatttacccctgttttctcaggcgagtttcagattcaccacgttgcatcacccgttgcaacacctccgcttccagctccgctaatcgcacgctccctaatcgacgcggacgggggatatccactgtcaaatccagaccaatttttccctcttcaattaacagcacccggtcagccatcgctaccgcttcgctcacatcatgcgtcaccaacagtacggtaaagccgtgctcctgccaaagactcacaatcaaatcctgcatctcgagtcgcgttaaggcgtccagcgccccgagcggttcatcaagcaacaataatcccggtcgatgaatcaacgctcttgccagcgccactcgctgtttctgcccgccagaaagtgcggcaggccattcccctgcgcgattctccagtcctaccgcagccaacgctcgacgtgcggcatcgcgccactggcctttaaggcctaacccaacgttatcaatcacgcttttccacggtagcagacgcgcatcctgaaacatcattcgcgtgtcttcctgaatttcagccagcggtgtggtgcccgctaacacatcgcctgcggttggcgtttccagacctgccagcaggcgcagcagggtacttttgccaccaccgctgcggcccaccaccgccacaaactgacctgccggaatatgtaaatccagttggttcaggacgatattttccgcgtaatgtttgcttactgcattgagcaacaatggcgtgccctggttcagacgagcagtattcataccgtggcctccttcaaatgataagccgggttccagcgcaaccagaggcgctctaacagctgcgcgctgacgtcagccagtttgccgagcagggcgtaaagaataatagcgactaccaccacgtccgtttgcaaaaacccccgcgcattcatcgccagataaccaatgccactattggcagaaatggtttcggcaacaatcagcgtcagccacatcaggcccaacgcaaaacgcacgccgaccataatactgggcagggcaccaggcaggatcacatggataaacagcggtatgccggataatccatagctacgcgccatctccaccaacccgcgatcgatattacggatgccatgccaggtgttgatataaatggggaatagcgtaccgagcgccaccagaaagatttttgcggattcatcaatgccaaaccacaaaatcaccagcgggatcagcgccagatgcggcacgttgcgcaacatctgaatactggtatccagcagccgttctccccagcgagatagcccgctaatcagtcccaaaatcaaccccaggcttccgccaatactaaagccaatcagcgcccgccaggagctgatcgccagatgctgccacagttcgccgctggcggagagcgtccagaacgccgtcaccactccttccggactaggcaaaatacgcgtgctcagccagccaacgctggaggccagttgccacaccgccacgatgcccaccggtaaaaaccagggggcaacgcgcaataaccacttcttcactggcgttgccattatttcttccttagctttgcgcgactttacgggggataaaatcattcgccaccgcttcgccttgcggattcagcggctgcggctggggaatttccgggatggcgacatccagaagcgggaacagcaactcgccaacccgatacgcttcttccagatgcggatagccgctaagcacaaaactgtcgatgccaagcgcggcatattcgttgattcgcgcagcgaccgtaggaccatcgcccaccagcgccgtcccggcaccgccgcgcactaagccaacgcccgcccataaattggggctgatctccagattgtcgcgcttgccgttatgtaacgccgccattcgctgttgccctacggaatccgtccgggcgaatgcggcctgtgctttggcgatagtttcatcatcaagatggctgattaaccgctcggcggcctgccacgcttcgtcgttagtttcacgaacaatcacatgcagacgaataccgaaacgaattttgcgtccatgcgcggcagctttcgcccgcacttgttcgattttctctttaaccagttccggcggttcgccccaggtgaggtagagatcaacctgttctgccgccagctcctgggcgacatcactgcttccgccaaagtaaagtggcggatacggctgttgaatcgccgggaagagcagttttgctccgcgcacatgaatatgtttaccgttgaaatcgacggtttctctctgcaataaacgccgccagacctgggtaaattccgcgctggcttcgtagcgctcgctatgatcaaggaacactccgtcgcctgccagctcttgtggatcgctgcctgtgaccaggttaaacaacgcacgtccattactgagacggtcaagcgtggcggcctggcgggcggcaacggtaggactggttacgctgggacgcagggcgacaagaaacttcagccgctgcgtcaccgggatcatgcttgcggcaaccagccacgcatcttcgcaggagcgccccgttggaattagcacaccggtatagccaagacgatccgccgcttgcgcaatttgttgcagataaccgtgatcaaccgggcgactaccttcttccgttcccagataatgcccgtcaccgtgggtcggtaaaaaccagaacatattcagactcataattgttttccttccagttgagtgggctgccagatgcgctggcgaatatcgacttttttcggcaccagacgattttcataaaacagatctgccgtttgctgctgtaaggcggcaacctcggcgttaaccggtttgatggtggtaggagggcgatgatctaagtaagaggcaatcaccggtgccggtaagcccatcgtttttgccagtaaagcgatgctttgctcgcgctggctgcgggttaacgcatcggcctcactaaaggttgccagtacgccctgaataaaagcgccgtttttttctgcatagggacgagctgccagataaaagcttccagtttgattgagatcggtgccgtctttcagcacccgcacgccgccctgtaataatgcagcagagtagtagggatcccagatagcccaggcgtcaacgttaccttgctggaacgcggcgcgggcatcagcgggcgtcaggtaagtgggttggatatcggtaaacttaagtccggcctgacgcagtgcacgcagtaaaaggttgtgactactggaacctttctgaaaggcaactttgtgacctttaagatcggctacggttttgatcgggctgttttctgccaccagaatcacttcggctttgggcttcggtggctcgacgcccacgtacaccaaatcagccccggcagcctgggcaaagattggcggaatatccccggtactgccgagatcaatactgccaacgtttaacgcttccaacatttgcggacccgcggggaactccacccaggagattttactttccggatagcgtttttccagtaactggtggctttttgccagcaccataccaatactgcctttctgatagcctatacgtaacgcttcagggctggattctgcagcaaccgcaaaagtagagacgctaagcaatcccgccagcgccagtttaatgatgttacgcatgggcattacctcgcagagacagaaggtcaggaacctgaacatcgcggcggtgcaatgcctgccagaaagtttctagcgcggtatcaagacgggtttgcagatttggcgtgaactggggtctgtgatggtaatcaattacttgactgtcatcggcaaacacgccgtgcaggatctcctgagctttcagtgcgcttaaaactggtttaagggcataatcgaccgccagcagatgggccacggtaccgcccgtcgccagcggtagcaccactttgccttgcaaagcgcgttctggcagcaggtcgagcagggttttcaacgcaccggaataggcggctttatacacaggcgtggcgacaatcagcccatcggcctgttgcagctgttcggtgaaggtcttgagtgccggactatcgaaacgagcataaagtagatcttccggggcgaagttttgcagattccagtgataaacctctacatccaggccatttagtttttcccgcgcatattccagcaaggagctggagcgagaaggaaagcgaggactacccgccagggtgatgacacgcatactctctccttataaccaattgttctttttttgttaacattgataacaattcggtcagtctgtcggagagacaagaaaattccaaatataaattttgtgtatctttttctgaaaataaactaaagaaagggctttatatatcacgcatatttatttattggatagtcattagatgttgaatcaatgaattactcgttcagttaatatttaaatattcatgaaatctataaattaaagatttgtcacttattggatttagtatgcttgatttaaatggcggacaattattgttattattaagtctaatgtcatttaaaggcattatcatatttacgaagagatcaggatgataacgatgaaaaaaagtgtattgacggcgtttataactgtggtatgtgcaacgtccagcgttatggctgctgatgataatgctatcacggatggcagtgtaacatttaatggtaaagttattgctccagcttgtaccctggtagctgcgacgaaagattccgtggtgactttgccagatgttagtgccacgaagttgcaaaccaatggtcaggtttctggcgtgcaaattgatgtgccaattgaattaaaagattgtgatactaccgtaacaaaaaatgcaacgttcacctttaatggcactgcggatactactcagattacagcgtttgctaaccaggccagttctgatgctgctacaaacgtggccctgcaaatgtatatgaatgatggtacaacggccatcacgccagacacagaaaccgggaacattttgttgcaggatggagatcagacgttgacttttaaagttgattatatcgctacggggaaagcgactagtggtaatgtgaatgcggtaacaaatttccatattaactattattaatagaactcattaattgttttattaattagtacccctccagtgttctggaggggatattcatattttttaagagtgactatttatgaaaacttgcataacaaagggaattgtgaccgtaagtttaacggcaatattactcagctgcagttccgcatgggcggcaggtaaaggcgggattggacttgcagcaacacgtcttgtttatagtgaaggtgaagagcaaattagtctgggtgtacgtaacaccagtccggatgttccttatcttattcagagttgggtgatgaccccagataataaaaaaagtgcagactttattattacaccaccgctatttgtgctgaatccggcaaatgagaatctgttacgcattatgtacattggagcgccgttggcgaaagacagagaaacccttttcttcactagcgtacgggcagtccctagtacaacgaagcggaaagagggaaataccctgaagattgccacacaaagcgtcatcaaacttttctggcgaccaaaaggtttagcgtatcccttaggcgaggctccggcgaaactgcgttgcactagcagtgctgacatggttacggtcagtaacccaacaccttatttcattaccctgacagacctgaaaataggtggaaaagtagttaaaaatcaaatgatttccccctttgataaataccaattttctctgccaaagggggccaaaaatagcagcgtaacgtatcgaaccatcaatgactacggggcggaaacgccgcaactcaactgtaaaagctaagccgtcttcagttaagagagcgagatgtatagaactcatcgacaacacagcctgttaagctctggtggagtgccaagctttattggtgggctggtggtgtttgtgagcgcagcgttcaatgcacaagctgaaacctggttcgatcctgcttttttcaaagatgatcccagtatggtggccgatttgtctcgtttcgaaaaaggacaaaaaataacgccaggggtttatcgtgtcgatattgttctgaatcagacaattgtagatacgcgcaacgtcaattttgttgagataacgccagagaaggggattgccgcctgtttgacgactgaaagcctggatgcaatgggtgttaatactgatgcgtttccggcttttaaacaactggacaaacaagcgtgtgtgccattggcggagattattccggatgccagcgtaacgtttaatgtgaataaactccgtctggaaattagtgtaccgcaaatcgccatcaaaagtaatgcccgtggttatgtcccccctgaacgttgggatgaagggatcaacgcgctattactgggatatagctttagcggggctaacagtattcatagcagcgcagacagtgattctggcgacagctattttctgaatttaaacagtggcgttaatttaggcccatggagattgcgcaacaatagtacatggagtcgtagtagtggccaaaccgcagaatggaagaatctcagcagctatttgcaacgggcggttattcctctgaaaggcgaactgaccgtaggtgatgattatactgcaggcgattttttcgatagtgtcagctttcgtggtgtgcagctggcgagtgatgacaacatgctgccagacagcctgaaagggtttgcgcctgtggtgcgtggtatcgccaaaagcaatgcccagataacgattaagcaaaatggttacaccatttaccaaacttatgtaagccctggtgcttttgaaattagtgatctctattccacgagcagcagcggtgatttgttagttgaaatcaaagaagcggacggcagcgtcaatagctacagcgtaccgttctccagtgtgccattactccagcgtcaggggcgaatcaaatacgcggtgacactggcgaaatacagaaccaatagtaatgaacagcaggagagcaaatttgcccaggccacgttgcagtggggcggaccgtggggaacgacctggtatggtggtggacaatatgctgaatattaccgtgccgccatgtttggtctgggatttaacctcggcgatttcggagcaattagcttcgatgcgacccaggcgaagagtacgctagcagatcaaagcgaacataaaggtcagagttatcgttttctgtatgccaaaacgctcaaccacttgggcactaactttcaattgatgggctatcgctatagcacgagcggtttctacaccctttccgacaccatgtataaacatatggatggctacgaatttaatgacggtgatgatgaagatacgccgatgtggagccgttattacaatttgttttacaccaaacgtggcaaactgcaggtcaatatctcccagcaattaggcgagtacggtagcttttatttaagtggtagccagcaaacttactggcatacggatcaacaggatcggctattacagtttggctacaacacgcaaattaaagatcttagcctggggatttcctggaactacagtaagtcccgtggtcaacctgatgctgatcaggtgtttgctctaaatttttccctgccgctcaatctgttgctccccagaagtaatgatagctataccaggaaaaaaaattacgcctggatgacctctaacaccagtatcgataacgaagggcacactacacaaaacctgggtttaacggagacattactcgatgacggtaacctgagctacagcgtgcaacagggatataacagcgaggggaaaacggctaatggtagcgccagcatggattacaaaggggcgtttgcggatgcccgagtgggctacaactacagcgataacggcagtcaacaacaactgaactacgctcttagtggcagtttagttgcccatagtcagggcattaccctggggcaaagcctgggggaaactaacgttctgattgcagcaccaggcgcagagaatactcgtgtggcgaacagcaccgggctgaaaactgactggcgcggatataccgttgttccttatgccacttcttatcgggaaaatcgaatcgcacttgatgcggcgagcttaaaacgtaacgtggatcttgaaaatgcagtagtcaacgtggttcccaccaaaggggcgttggttctggcggagttcaatgcccatgcgggtgcaagggtattaatgaaaacaagtaagcagggtataccgctgcgttttggcgcgatagcgacgctggacggcgtacaggctaatagcggcataattgatgatgatggcagcctctatatggcgggtttaccggcgaagggaacaataagcgtgcgctggggcgaagctcccgatcaaatttgtcatatcaattacgagcttaccgaacaacaaattaactctgcgattacgcgaatggatgccatatgcagataatctttggagaaaaatgcgtgagtttactacgactattttttgccgccgtcttaatgttatggtgcgctcaaaccgctgcttatagcgggcagtgtcatactactcaggggaatccgtatattggcgtcaattttggcgttaaaaccctggaggaagaagcaaatacggcaggggtagttaaagacaaattttatcagtggaacgaaagcaatgattattatgtttcctgtgattgcgataaagacaatgtcagaagtggccgatgggcattcgccgcggatagtccgttagtctatttaggcgacaactggtacaaaattaatgactatcttgccgccaaagttttattgcaggttaaaggcagttctcctactgcggttcctttcgaaaacgtgggcacagggggggatacccgatggcatatttgcgaccctggcggtcaacgtttaggtgggcagggggcaagcggtaatagcggtagcttttccctgaaaatattgcagccgttcgttggcagcgtcgtcattcctcctatggcgctggcgcgattatatgaatgctacaacatacccgcaggtgattcctgcacgactacaggtacaccggttttagtgtattacctgtctggtacgatcaatagtcttggcagttgttccgtcaatgccggagagacaattgaagttgatttaggtgatgtcttcgctgccaatttccgtgttgtagggcataaacctcttggggccagaacggcagaacttgcaattccagtcaggtgtaacacgggaaacgcgggattagttaatgtcaacctgagtctgacggcaaccacagaccccagctatccccaggcgattaagacgagtcgtcctggcgtgggcgtggtggtgaccgatagccagaacaacattatttcccctgctggtggaacattaccgctctctattcctgatgatgcagacagtatcgcgcgaatgaatgtctatccagtcagcacgacaggtgtaccaccagaaaccgggcgatttgaagccacggcaacggtgagaataaattttgattaacgcgtgaacgtatgaagaaaaaaacgatatttcagtgcgttatcttgttctttagcattcttaacatccatgtcgggatggctgggcctgaacaagttagtatgcatatttatgggaatgtggtcgatcagggctgtgatgtcgccaccaaaagtgcattacaaaatattcatattggtgattttaatatcagtgattttcaggccgcgaataccgtaagcactgctgctgatttgaatatcgatatcaccggttgtgccgctggtattactggcgcggacgtcctttttagcggcgaggctgacacccttgcgccgacactgctcaaactaactgacacaggcggaagcggtggtatggcaacggggattgccgtgcaaattcttgatgcgcaaagtcagcaagaaatcccgctcaatcaggtccagcctcttacgcccttaaaagccggggataacacactcaaatatcaacttcgttataagtccacaaaggcgggagcaacgggcggtaatgcgacggcggttctctattttgatctggtttaccagtgaaggagtgatgttgaaacggataatctggattctgttcttattgggattaacgtggggctgtgagctatttgcccatgatggcacggtcaacattagcggaagctttcgccgtaatacatgcgtgctggcacaggatagcaagcaaatcaatgtgcagttaggcgatgtcagcctgacacgtttttctcatgggaattatggcccggagaaatctttcatcattaatttgcaggattgcggaacagatgtcagcacggttgacgtcacctttagtggaacccccgacggagtgcagagcgaaatgttgtccattgaaagtggtacggatgcagccagcgggctggcaattgcgattctggatgatgcgaagatattgattccgcttaaccaggcgagtaaagactacagcctacatagcggtaaggtgccattaactttttatgcgcaattgcgacctgtcaatagcgatgtgcagagcggtaaagtgaatgccagcgcgacatttgtacttcattatgactaatacgtggaacagattggcgctcttgattttcgccgttttaagcctgctggtggcgggtgaattgcaggcaggagtggtggtcggcggaacgcgatttatctttccggcagacagagaaagcatatctattttactgactaataccagtcaggaatcctggcttattaacagtaaaatcaaccgcccaacgcgttgggccgggggggaagcgagcacagtgccagcaccattactggccgctccgccacttattctcctgaagcccggtacgacaggcacgttgcgcttgctgagaacggaaagcgacatcttgcctgtggatcgcgaaacgctatttgagttaagcattgccagcgtgccatccggcaaagttgaaaatcagagcgtaaaagtggcgatgcgcagcgtatttaaactgttctggcgacccgaaggtttgccgggcgacccgctggaagcttatcaacaattacgctggacacggaatagccagggtgtacaactcactaacccaacgccttattacattaacctgattcaggtgagtgtaaatggtaaagcgttaagtaatgtgggagttgtgccgcctaaaagccagcgtcagacaagctggtgtcaggcaatcgcaccgtgtcatgtcgcctggcgggcgataaatgattacggcgggttgagtgcaaagaaggagcaaaatctgccctgaaacaggttcggaaaacgtttgcgttttttttgccgcaggtcaattcccttttggtccgaactcgcacataatacgcccccggtttgcacaccgggaatccaggagagttcatgtactaccccttcgttcgtaaagcccttttccagctcgatccagagcgcgctcatgagtttacttttcagcaattacgccgtattacaggaacgccgtttgaagcactggtgcggcagaaagtgcctgcgaaacctgttaactgcatgggcctgacgtttaaaaatccgcttggtctggcagccggtcttgataaagacggggagtgcattgacgcgttaggcgcgatgggatttggaagcatcgagatcggtaccgtcacgccacgtccacagccaggtaatgacaagccgcgtctctttcgtctggtagatgccgaaggtttgatcaaccgtatgggctttaataatcttggcgttgataacctcgtagagaacgtaaaaaaggcccattatgacggcgtcctgggtattaacatcggcaaaaataaagatacgccagtggagcagggcaaagatgactatctgatttgtatggaaaaaatctatgcctatgcgggatatatcgccatcaatattagtagcccgaataccccaggattacgcacgctgcaatatggtgaagcgctggatgatctcttaaccgcgattaaaaataagcaaaatgatttgcaagcgatgcaccataaatatgtgccgatcgcagtgaagatcgcgccggatctttctgaagaagaattgatccaggttgccgatagtttagttcgccataatattgatggcgttattgcaaccaataccacactcgatcgttctcttgttcagggaatgaaaaattgcgatcaaaccggtggcttaagtggtcgtccgcttcagttaaaaagcaccgaaattattcgccgcttgagtctggaattaaacggtcgcttaccgatcatcggtgttggcggcatcgacagcgttatcgctgcgcgtgaaaagattgctgcgggtgccagtctggtgcaaatttattctggttttatttttaaaggtccgccgctgattaaagaaatcgttacccatatctaattatttcttcgaattcctctttataagataatcagggctttattttcagccctggttgttttatattcatcgctgttgcttatttagacattttgtacttttattgttgaggttattaagcgaagcgacaatggattgtgttgctgcggttttatagggtaggggagaggcagatgcgaattaaaccagacgataactggcgttggtattacgatgaagagcacgatcgaatgatgctcgatttagccaatggtatgctatttcgcagtcgttttgcgcgcaagatgttgactccagatgccttttctcccgcaggcttttgcgttgacgacgccgcgctctatttctcttttgaagaaaagtgccgcgattttaatttatctaaagaacaaaaagccgaactggtgctgaatgcactggtagcaattcgctatctcaaaccgcaaatgccgaaaagctggcattttgtttcccatggtgaaatgtgggtgcccatgccgggcgatgcggcctgcgtttggttgagcgatactcacgagcaggtcaatttgctggtcgttgaatctggcgaaaatgccgcactatgcctgctggcacaaccctgcgttgttattgcgggtcgcgcgatgcagttgggcgacgccattaaaatcatgaacgacaggctgaaaccgcaggttaatgttgacagcttcagcctcgaacaggcagtttaacgcgccaacttaagtgcagtcttcggtacacagctacagcaaagaatggtgccatcatcgcccattgcactttttttcagcggcgtgacttcgccttctaaaagctgaacacggcaacttccacaaatgcccgcgcggcaagaataagggatacgaattccctgattttctaattgctccagcaacacctgttggttatttccacgaaatgcctgtccctgccagtcaatatctacatttgcgtccggttgttgcgtgatgttggcggtatcatcagcggcagctgcgccgtaaatttttgccggagccgttgccagaatttccacctcatcgccaacgcgaatcacgccgctattacgggcaattaaattctgaccaaaatcgacatcgccgttatcctgggcagtgcggaaagattgcaatgtttttaatggttcgcctgccggatgtttttgccctttttctgggctgacggtggtgaaaatacagcggctacaaggtttaaccacatcaaacaccacatcaccaatgcgaatcactttccagcgatcttcttcccaggcactcgcgccggaaaccaccagattggggcggaattgctccatttttacactggccggacaacgttgttggagatcacgtaagctggcttcgttagcaagaaggtaaggatagccatcagcaaaactcagaggtacagtgttgtggcgtttcacgcgccgggtcatttgtggccccacccagcgtaattgcacttcgcgggagaaaaatccacttagccatttgttgatcgcgtctggcgcaattcgcgcggtaaaatgtgtgccccaaacttcggttggtgcgtcttgtgtggcgaaatcagcaaaacgaacatatgcgctactgccatctggtgcggtgagatgcaagccatcatgcacaggactaggagtaaaccgtaccatctggggaaactggcgagcggtaataaacgtaccgtcaggttccgtgatcataaagatgcgatcgaaggccagaccactgacatctgccagagcatgtgtaagaccaatgccgcgcatgcttttaacaggatgaataaaaagccggattaatgtcgccacggtgcggtcctcaaatgaaaataagccctcaactttatgacatgacgcgcttattagctataatgcgcaacaattttcttagcgcctgtcccattaggctattttatttgtcagtttggccctgggttatgctcgaaatcctcacgtacttgtgtacgctccggtttctccgcgctgtccatgtccagactgactgcaacaattacgcctactgcggtaggctcttagagtaaaagtgacgatatgaattctctgtttgccagtacggcccgtgggctggaagagctgttaaaaactgaactggaaaacctgggggccgttgaatgccaggtggttcagggtggggtccatttcaagggcgacacacggcttgtttaccagagcctgatgtggagccgcctggccagccgtattatgttgccgctgggcgagtgtaaggtttacagcgatttagacctctatctcggtgttcaggcgatcaactggacagagatgtttaatcctggcgcgaccttcgctgtccacttcagtggtttgaatgacaccatccgcaacagtcagtacggcgcgatgaaagtgaaagacgcgatcgtcgatgctttcacgcggaaaaatctgccgcgtccaaatgttgatcgcgatgcgccggatatccgcgttaacgtctggctgcataaagaaaccgccagtatcgctcttgatctgagtggtgatggtttacatctgcgtggctatcgcgatcgtgctggtattgcgccgatcaaagaaaccctggcagccgctattgtgatgcgatccggctggcagccaggaacaccgctgctcgatccgatgtgtggttccggtacgttgctgattgaagcagcgatgctggcgaccgatcgcgcaccaggcttgcaccgtgggcgttggggctttagcggctgggcgcagcatgatgaagctatctggcaggaagtgaaagcggaagcgcaaactcgcgcccgtaaaggcctggctgagtatagctctcatttttacggtagcgacagcgacgcacgggtgattcaacgtgcacgcactaacgcccgtcttgcggggattggtgaactgatcacctttgaggtgaaagatgtcgcgcaactgaccaatccgctgccgaaagggccgtacggcacagtgttgagcaacccgccatacggggaacgtctggacagcgaaccggcgctgattgcgctgcatagcctgctgggtcggatcatgaaaaaccagtttggtggctggaatctctctttgtttagtgccagcccggatctgctaagctgcttgcagctgcgtgcagacaaacagtacaaggcgaaaaacggcccgctggactgcgtacagaaaaattaccacgttgccgaaagcactccagacagcaaaccggcgatggtagcggaagactacaccaaccgcctgcgtaagaacctcaaaaaattcgagaagtgggctcgccaggaagggattgaatgttaccgcctgtatgacgccgatctgccagaatataacgttgccgttgaccgttatgccgactgggtggtggtgcaggagtatgcgccgccaaaaactattgatgctcacaaagcgcgtcagcgtctgttcgatattatcgctgcaaccattagcgtactggggattgcgccaaacaaactggtgctgaaaacccgtgaacgccagaagggcaaaaaccaataccagaaactgggcgagaagggcgagtttcttgaagttaccgaatataacgctcacttgtgggtgaacctgacggattatctcgatactggtctgttcctcgatcaccgcatcgcccgtcgtatgctcggtcagatgagcaaaggcaaagatttcctcaacctgttctcttataccggcagcgccaccgtgcatgcgggattaggcggtgcacgcagcaccaccaccgtggatatgagccgtacttatctggaatgggcagaacgcaacctgcgtctgaatggcctgaccgggcgtgcgcatcgcctgattcaggccgattgcctggcgtggctgcgtgaggcaaatgaacagttcgatctgatctttatcgatccgccaaccttctctaacagtaaacgaatggaagatgcgtttgatgttcagcgcgatcatctggcgctgatgaaagatttgaaacgtctgctgcgtgcaggtgggacgatcatgttcagcaacaacaaacgtggcttccgtatggatctcgacggcctggcaaaactgggactgaaagcacaagaaattacgcaaaaaacgctctcccaggatttcgcccgtaaccgccagatccacaactgctggctgattaccgcagcctgaaaggaatagtaatgagtttaatcagtatgcatggcgcatggctgagcttcagcgacgcgccgcttctcgataacgcagaactgcatatcgaagataacgaacgtgtttgtctggtgggccgcaacggcgcaggcaaaagcacgttaatgaaaatcctcaaccgtgaacaagggctggatgacggtcgcattatttacgagcaagatttgattgtagcgcgtctgcaacaggatccgccgcgtaacgttgagggtagcgtttatgatttcgttgccgaaggcattgaagaacaagcggaatatctgaaacgctatcacgatattagccgcctggtgatgaacgacccgagcgagaaaaatctcaacgaactggcgaaggttcaggaacagctggatcaccacaacctgtggcagctggaaaaccgcatcaacgaagtgctggcgcaactggggttagatcctaacgttgcgctgagcagcctttccggcggctggttgcgtaaagcggcattaggacgcgcgctggtgagtaatccgcgcgtgctgttgcttgatgaaccgacaaaccacctggatattgaaaccatcgactggctggaagggtttttgaaaactttcaacgggacgattattttcatctcccacgaccgtagctttatccgcaatatggcgacgcgcattgttgatctcgatcgcggcaagctggtgacctatccagggaattacgaccagtacctgctggaaaaagaagaagccctgcgcgtggaagaattacaaaatgccgagttcgatcgcaaactggcgcaggaagaggtgtggatccgccaggggatcaaagcacgccgtacccgtaatgaaggccgcgtacgcgccctgaaagcgatgcgtcgcgaacgtggtgaacgtcgcgaagtgatgggtaccgcaaagatgcaggtggaagaggccagccgctccggtaaaatcgttttcgaaatggaagacgtttgctaccaggttaacggtaagcaactggtgaaagatttttctgcccaggttctacgtggcgacaaaattgccctgattggtccgaatgggtgcggcaaaaccacgctgctaaaactgatgctcggtcagcttcaagtggacagcgggcgtattcacgttggcaccaaactggaagtggcttatttcgatcagcaccgcgcggaactggatcccgataaaacggtgatggataaccttgccgaaggtaagcaagaggtgatggttaacggcaagccacgccacgtattgggctatttgcaggactttctgttccatccgaaacgggcgatgacgccggtacgtgcgctttctggcggtgagcggaaccgcttgctgctggcgcgtttgttcctcaaaccaagcaacttattgattcttgacgaaccgaccaacgatcttgatgtcgaaacgctggaactgctggaagaactgatcgacagctatcagggcacggtattgctggttagccacgatcgtcagtttgtcgataacaccgttacagaatgttggatcttcgaaggcggcggtaaaattggtcgttatgtcggcggttatcatgatgcccgtggtcagcaagagcagtatgtggcgctcaaacagcctgcggtgaaaaaaaccgaagaagccgccgcggcaaaagcagaaactgtaaaacgcagcagtagcaaactaagctataaattgcagcgcgaactggagcagctaccgcaattgctcgaagatctggaggcgaagctggaagccctacagacgcaagtggcggatgcttccttcttcagtcagccgcatgagcagacgcaaaaagtgcttgctgatatggctgctgcagagcaggagctggagcaagcctttgaacgctgggagtatcttgaagcgttaaaaaatggtggctgatcgcaaaatagtcgatttaaacagagacagctgacaacggtaaaattgcctgatgaactgggtttatcaggcatgaaaaccaacactttgttagtcatctgtaaaatagcgcatcattaaggagtaccaatgtgcgaacatcatcatgccgcgaagcacatcctgtgcagccagtgtgacatgctggtggcgttaccgcgccttgagcatggtcagaaagcggcatgtccccggtgtggcacaacgttaaccgtggcgtgggatgcccctcggcagcgtcccaccgcctatgcgttggctgcactgttcatgctgttgctgtccaacttgtttccttttgtgaatatgaacgttgcaggagttaccagtgaaattacattactggaaattcccggcgtgcttttttctgaggactacgccagcctcggcacctttttcctgttgtttgtgcaactggttcccgcgttttgtctgataaccattctgttactggtgaatcgcgcggaattaccggtccgtttaaaagagcaactggcacgggtgctttttcaactcaaaacctggggaatggcggagattttcctcgcgggtgtgctggtcagtttcgttaaactgatggcttacggcagcattggggtaggcagcagctttctcccctggtgtttattttgtgtcctgcaactgcgcgcttttcagtgcgttgatcgtcgctggttatgggacgacatcgccccgatgccagaactgcgccagccgctaaaaccaggcgtcacggggatacgtcaggggctgcgtagctgctcctgttgtacggcaatccttcctgctgatgaacccgtgtgcccgcgttgtagtaccaaagggtacgttcggcgtagaaacagcctgcagtggacactcgcgctgcttgtaacgtccatcatgctgtatcttccggctaatattttgcccatcatggtgacggatttattaggcagcaagatgccgagcacgattctcgctggggtcattctgttatggagcgaaggctcttatcccgtcgctgcggtgatctttctggccagtattatggtgccaacgttaaagatgatcgccatcgcgtggctgtgttgggatgccaaagggcatggcaagcgcgacagtgaaagaatgcatttgatttatgaagttgttgagtttgtaggccgctggagcatgattgacgttttcgttatcgcggtgctcagcgcgctggtgcgtatgggaggtttaatgagtatttatccggcaatgggtgcattaatgtttgctttagtcgtcataatgacaatgttttctgctatgacgtttgacccgcgtttgagctgggatcgtcaacctgaaagtgagcatgaggagtcctgacagtatggaatctaataatggggaagccaaaatccagaaagtgaagaactggtctcccgtgtggatatttcctatcgtcacggcgctcattggggcctgggttcttttttatcattacagccatcagggaccggaagtgaccctgatcaccgcgaatgcggaaggaattgaaggtggcaaaaccaccattaaaagccgtagcgttgacgtcggcgtggttgaaagcgccacactggctgatgatttgacgcacgttgaaatcaaagcgcggctgaattccggtatggaaaaattgctgcataaagacaccgtcttttgggtggtgaaaccgcagattggtcgcgaagggattagcggcctgggaacgctgctgtctggagtttatatcgaactgcagccaggcgcgaaaggcagcaaaatggataaatacgatttgctggacagcccaccgttggccccgcctgatgcgaaaggtatccgtgtgattctcgatagcaaaaaagccgggcagctcagcccaggagatccggtgctgttccgtggctatcgggtaggtagcgttgaaaccagcaccttcgatacacaaaaacgcaatatcagctatcaactgttcatcaatgcaccttatgaccgactggtgaccaacaatgttcgcttctggaaagatagtggcattgcggttgatctgacgagtgcagggatgcgtgtggagatgggcagtttgacaacgctgctgagtggcggtgtcagctttgatgtgccggaaggtctggatttagggcagccagtggcaccgaaaacagctttcgttttgtatgatgatcagaagagcattcaggatagcttgtacaccgatcacattgattatctgatgttctttaaagatagcgtacgcggtctgcaaccgggagctccggtagagttccggggtattcgcctgggtaccgtaagcaaagtgccattctttgcgccgaatatgcgtcagacatttaacgatgattaccgtattccggtactgattcgtatcgagccagagcggctgaaaatgcagcttggcgaaaatgcggatgttgttgagcaccttggcgaattgttgaaacgtggtttacgcggaagcctgaaaaccggaaacctggtcactggtgcactgtatgttgatctcgatttctatccaaatacgcctgcaataaccggtattcgtgaatttaatggttatcagattatcccgaccgttagcggcggcctggcgcaaatccagcaacgactgatggaagcgttggataagatcaacaaactgccattgaatccgatgattgaacaggcaaccagtacgctttctgaaagtcagcgcacaatgaaaaacctgcaaacgacgctggatagcatgaacaagatcctcgctagccagagcatgcagcagttgccgacggatatgcagagtacgttgcgtgaattgaatcgcagcatgcagggcttccagcctggctccgcagcctacaacaagatggtggcggatatgcagcgccttgatcaggtgttgcgagaactgcaaccggtgctgaaaacgttcaatgagaagagtaacgcgctggtatttgaagcgaaggacaaaaaagatccagagccgaagagggcgaaacaatgaaaaagtggctagtgacgattgcagcactgtggctggccggatgcagctccggcgaaattaataaaaactattaccagttacctgtggtgcagagcggtacacaaagtaccgccagccagggcaatcgtctgttatgggtagagcaggtcactgttcctgactatctggcggggaatggtgtggtttatcaaaccagtgatgtgaagtatgtgattgccaacaacaacttgtgggccagcccgttggatcaacagttgcgcaacaccctggttgccaacctgagtacgcaactgcccggctgggtggttgcctcccagcctctgggaagcgcccaggacacgctcaatgttaccgtaacggagtttaacggtcgctatgatggcaaggtcattgtcagtggtgagtggctgttgaaccaccagggacaactgatcaaacgtccgttccgtctggaaggagtgcaaactcaggatggttacgatgagatggttaaagtgctggccggtgtctggagtcaggaagccgcttctattgcacaagagataaagcgtctaccttaattataaagatttgtaaatataaccgtctccggtatgttgcctgaggcggtttttttgtctctaacgtgcggaaaaatttgttcctcttcacattttttgtacaaccgacatgcccgtgtagctcacaaatatgacagtggcgtgaattttgcgcattgacggcagttatgattcgcggtattgcttaactgtgattgcacatttagtaatcactgttttcttttccaccagaaaccagtatgagggaaacgaggcatgaagagacaaaaacgagatcgcctggaacgggcacatcaacgtggttatcaggccggcatcgccggacgcagtaaagaaatgtgtccctatcagacgctgaatcaaaggagtcaatggctgggaggctggcgagaagccatggcggacagggtagtaatggcctgattctgtctctttaaaaagaaacctccgcattgcggaggtttcgccttttgatactctgtctgattataatcagaaggcagacgtatcctggaacagaccgactttcaggtcgctggcggtatagatcagacgaccatcaaccagcacttcgccatccgccaggcccataatcagacgacggttaacaatgcgtttaaagtgaatacggtaggtcacttttttcgctgtcggcagtacctgaccagtgaatttcacttcgccaacgcccagcgcgcggcctttaccttcgccgcccagccagccgaggtagaaccctaccagctgccacattgcgtccaggcccaggcatcccggcataaccggatcgccaataaagtggcatccgaagaaccacagatccggattgatatccagttctgcttcaacataccctttgtcgaagttaccacccgtttcggtcattttgaccacacggtccatcatcagcatgttcggtgctggcaattgcgggcctttagcgccaaacagttcaccgcgaccagaggcaagaaggtcttcttttgtataggattcgcgtttatctaccatgttctctgtaagccttattttattgaagcacgcaggatagctaacacgtgtacgctgaacaagtccgatcagttcggaataaaccagttcagccaacgtaatggccatggaaaacggtgacgtccttcctgttggcttgcttgcgcgatacgttcctggatggtttgcatcagcgtcgtttggccttcgccatcccacaccagatttaataataacggcagtgcgtcagtcacatcgtctactgcccagatggtgaatttgccttcttctaccgctttcaccagttcactgtgaagacttaaatggcgaacgttagctgtggggataatgacaccttgtttcccggttaactcacgttgctggcaaatagcaaagaagccttcgattttctcatttaaaccaccgaccggctgggcgcgaccgaactgatcgacactacctgtgatagcgatactctgattcaccggcacatcggcgagggcgcttatcagggcgcagagttcagccatgctggcactatctccatcaacttcactgtaactctgctcaaatgtcaggcttgcactgaaggggatctgttgctcaagctgtagttcgctcatcaggaacgcttgcatgatcatcatccctttcgcatggatattgccgccaagctccgctttgcgttcgatgtcggtgaattcaccatcgccaatatgcacaacgcagctaatgcgagaaggttcgccaaaagcgcgtggatgacccggaaattcaatgacgctaagggcgttaatttgcccgatgcgttcgccttcggtttcaatcaggatttgctcctgaaggatctcatcctgcatacgttcagcgaggaaaccttcgcgccattcacgctgctgcagcattaagtttagctgctcgccggagaaggtgtcgccatcacacagggaggcgacctctttacactggcggaggatccactgcgggctaagcggaagtgtttcttgttcaccggtgtagcgtgctgcttcgcggataagtatcggccaggcatccgctcccggtgcaggtaagtgattatgtctggcggtaaatgtcacccagcgacaccactgggttacactctccgcatcgacaatctgcagagtatcttcaaattcgctataaatagcctgctcactaagctctggctccatctcctggaaatcagccaaactttcgcgttcgcctaccagaatgactttcagcttcaatggcatgctaggcacagagacggggagagggcggctctcatcaaacgcaacccagtcaaaacgctcgcggttaacgatatttttcagccgcatccacagcagaggttgcgccagcagtgtacgcaaagagataatgagaataccgccatttgcctgatgcaccagaccaggctgcagggtaatgtcgccattaaactggcgcaggcagccaaagagttgctccgcttctacccagtcggcagcgacaacttgcgttaaagtcgcaaaattatcatctgcactcactgcgtgacgtaagcggatggagtggccggaaacctcatagtgaccgcccaccagttggcctgcatcgctttgtagcgtacgcgcggcattggcaataagattcagatactcagactcttccggggccttcgccagcataaaagaggaggatgctcgcgtatgcagcaactgctccagcgcaaattgcagccgcggttgagtatcactgaataaaggatcgttttcgtcaatcaaatgtggctgagcaaatatttcctgatagctatcggtatcaggaaccaggtcacgccatgcaagtttcgtaatggtcaaagttgatgttttttagtctgttgtcaaagccgcgattataccgtaaccggcactacagcacacgtagaaagcaccgacaatactcctggcatgggcgttaaagctcacaggatggagattcttttcttcactggcctaaaaagctgatattctgtaaagagttacacggtaacattgagatcgctatgaaatatcaacaacttgaaaatcttgaaagcggttggaaatggaagtatctggttaagaagcatcgcgaaggggagttaatcacccgttacatagaagccagtgccgcccaggaagccgtcgatgtgttgctcagcctggaaaatgaacccgtgctggtaaatggctggattgacaagcatatgaatccggaactggtcaatcgcatgaagcaaaccattcgggcaagacgaaagcgccattttaatgcggaacaccagcatacgcgcaaaaaaaagcatcgatctggaatttattgtctggcaacgtctggctggtcttgcgcagcgtcgcggtaaaacgctttctgaaacgattgttcagctgattgaagatgcggaaaacaaagagaaatacgcgaataaaatgtcttctctgaagcaggatctgcaggcattgctgggtaaggaataactgacgaaagtcagttcaatttactaaaggcaaaaaaaaccccgcagcagcggggtttttctaccagacgagaacttaagcctgcggctgagttacaacgtctttgatacctttaacttcgatctctacgcgacgatccggagccaggcagtcgatcagtgcagcacgctgtttcacgttgtcacaggtgttgccagtaaccgggttggattcgcccataccacgtgcggagatcttgtctgccgggatacctttggagatcaggtaatcaacaacagactgagcacggcgctcggacagaccctggttgtaagcgtcagaaccgatgcggtcggtgtaacccagaacaactacggaaccgtctttcggatccaggttgctcagctggctgtacagctgatccagagcagcctgaccttccggtttcagggttgctttgttgaagttgaacagaacgtcagacttcagagtgaagtgcttggtctgtacttccggtgccggagctggagccggagcaactactggagctgcttcgccctgaccgaaacggtaggaaacacccaggctcagcatgccgttgtccggacgagtgccgatggtgtgtgcgtcaccgatgttgttggtccactggtattccagacgggtagcgatttcaggagtgatcgcgtactcaacaccgccagcgaagaccggagaaacgccggtgtcgtggtttttaccataaacgttggatttagtgtctgcacgccataccatgccacccagacgagtgtagatgtccaggtcgtcagtgattgggtaacccagtttagcggtcagttgaacgccctgagctttgtatgcaccgttttcaacgctgcctttgtacggcatacgacctaaccagtcgtaacccatttcaaagccaacatacgggttaacctggtaaccaccaaaagcaccagcgcccagttggttttcatgggtcgggccattgttgttgatgaaaccagtgtcatggtactgggaccagcccagtttagcaccagtgtaccaggtgttatctttcggagcggcctgcgctacggtagcgaaaccagccagtgccactgcaatcgcgatagctgtctttttcattttttgcgcctcgttatcatccaaaatacgccatgaatatctccaacgagataacacggttaaatccttcaccgggggatctgctcaatattaactctaccgatatcttcggcttatgccgagcacccctggcgatgtaaagtctacaacgtagttgaaaacttacaagtgtgaactccgtcaggcatatgaaaaaaaagtcttgtataaggtatgtttaatcttttttgtcagcgacaatttacagaagagaatcgcggaaaccgcttcagacaagcctccgcaaggaaaattagtcacgactgaaagcattggctgggcgacaaaaaaagttccaggattaatcctaaatttacttaatgatacaaattagagtgaatttttagcccggaaagttgtctcgtggcgtgagaggatgcgcttaccggacgcataataaaccccatagcgttaccttcatttgccgcatcaacaagttcagcatgctcttcttcagtcaaatcatctgccaaccaaccgatcaccacactgtaattgcccgtgcgtaaagcgcgaaccatactctccacagtgtggcaaggggagagctggctaatctgcattactttcgttaagggtagcccagatgcctgaacccattcccgactcagtttttgttgcggtgttaaccagagttgccagcggctttgctgaccgagttgctgtaacaatggcaacagtagaagttgcgtcatcatgggctgatcttcgcgatagacaacttcactgataagcccggctgtagtgttttccgtagagacacgcgcaattttacttgctgcggaactgaagctgctagaacgatgtgcatagccactagtgtacataatcaatccagcccctgtgagttactgtatggatgtacagtacatccagtgacaacaaagatcaaccctattttcggaaagagcctcgcaaattttgtcgttggtgacgggaaaacataaattaatcttgccccttaagaataagttgcctattttcgtagttaacggatccgttaatgtgaatcattcttttatgttatgattttaaaaggaattttatgaaaagcctctcctataagcggatctataaaagtcaagaatacctggcaacgttgggcacaattgaataccgaagtttgtttggcagttacagcctgaccgttgacgacacggtgtttgcgatggtttctgatggtgagttgtatcttcgggcttgtgagcaaagtgcacagtactgtgtaaaacatccgcctgtctggctgacatataaaaagtgtggccgatccgttaccctcaattactatcgggttgatgaaagtctatggcgaaatcaactgaagctggtgcgtctgagcaaatattctctcgatgcagcgctgaaagagaaaagcacgcgcaatacccgggaaagactgaaagatttgcccaatatgtcttttcatctggaagcgattctcggggaggtggggattaaggatgtacgggcgttacgtatacttggggcaaaaatgtgttggttgcgactgcggcagcaaaacagtctggtgacagaaaagattctgtttatgcttgaaggtgccattatcggcattcatgaagctgcgctcccggtggcacgccgccaggagcttgcagaatgggctgactctcttacgccgaaacaggagtttcctgcggaacttgagtaattacgcgctaacaggagtttcctgcggaacttgagtaatctggcgttgcagacgaccaatctcaggcagtaatgcaatcaataatccaacttgttgtacgaccagaggttctttgctgtctgcccgtggttcaagttgctgcatccgctgtttcaggctagctaatgcctcattgacgcgttcttcatcagcaggttgatgatgtaacgcgtcatcaacatagcaaactgcgtcatcaagaaacgccagaatttcaggattagttaactgctcccggtgagcaccgagggcactgatatagctggtaaacgtatggttaaggcacagcaaccgaaacgcggcttcgcgaatttgcggggtaacgttcggctcgctggacatattacttaccacgctcgccagctcagcatcacggttgtgtgcatcgcggcgggcaatacgatacgccagacggttatcacgcccctgatggtattgctccagtatggcatcgagataccgacagttggcctctgtggcacgttcgagcatgcgcggcagattgcgaaactgccagtcaggccagatgtagctcactgccgcccacgcaatggcacaaccaatcagcgtatcgattacgcgaggtaacgctacttcaaaaccttcacccagtaagttaaaacacagtagcaccaaaagtgtgatgaacatcgttgcatgagcgtattgcacgttacggaaggcaaaaaagagcacgccggtaataaccagcagcaccagctgcccttccagacttggcacaaaccacagcacaggaatgccaatggcgatacctaccagcgtaccaataatccttaacttcaggcggtggcgcgtggcgttatagtttggctggcagacaaacaaacttgtcagcaagatccaatacccgtgatgcattccggttatctgaatgatggcgtagccgaagcacaacaccaggctcattcttaccgcatgacggaagagggcggattccggcgtgaagtgacggctaagacgcagccagatatcactcaacccgtgcgggctgtcatcagcgagctcattttcgtcattattatggggtagtgcctgggcctgttcactttcaattgttgccagttgggcatcaatggcgcgtaaattgttcagcaaaaatcccagtgttttgagtaaatcggcgggtgcgccgttatcgcgcatccgctccagcgcagcatcaatatgcgtaaaagcgcgctcaaaatgcggatcatgttgataaggctgacgcaacaaaatacagcgactcagttgctggcacgcctggccctgcatgctcatcagccgctgaaaacggaacagcacgtcgctgtggcgaaaatgttcacgcaatgtttgatactgaatatgagaagagctggcacgctcgtgaatatcctgtgcgacaaagtaataatgcagcgtgcgacgcgttccccgttgaccacgatcgccacgtaagcgggtcagcaggctgagtttcgtctgattcaatgtcgccatcagcagaccgttggcgagagccaaatcgtacagcggtgcctggctttgatcttcaatatcaggatcaaacatgcggctcttgagctcaagataacgcgccagttgttcatagcaacgcgccaggttgtcctgcagcgggcggaccgggaacagcagatgaccaataagtgtcaggacgttgtaccagacggcaccggccagcagatacatcggctgctgataccagtgctcatacagacttgttcccaacatagtgtaaatggcgatcagcaatgcaccgaaggcaattgttgcatagcgttgacccagaccgccgagcaaaatgaagccgctggtagagagcgttaagccaatcgcaaatagccagggccagggaaacagcaattctacactggcgctggcgataaaaaagcagaacagcgtaatgatgaggttacgcaaacgtcccgccagtcggtcatcgagatcggtcagcgccgctgccaccatccccagcgttagcggaatcgtcagttttacatcacccagccaccacggaaacgctgtggttccacaaagcgcaataaaaatacgcgcgtaatacagccaggcgctgttccaggtatagcgtttgagcaaaggacttagcataaaggccatattagtggattattcaaaacgacgacgtgcattggcttcacgcgcagcttgcgctgtttctacgcttaccacgcgacgaccaaccggccatagtgcaatagcggcaattttaaagttcgcaatgccgacaggaatgccaatgatactaatacattgtgcgatgcccgttgcaatgtgcatcaggcataaccaccagccaaagaaaatcagccagaaaatattcaataccgtaccgccagtattcagcagcacatttttgccagccgggttcagttcatcgacatgaatagcttcattgccataaggcaccagagacagtttagtgatctcccagcaggatcgtgtcagcggtaaggtaaaaatcagcacaatactgaccagagtcgccaacagccagcccagagtggtggcaaatccgccaagcacaaagttcagaatgttcaaaacggtacgcataaaacctcgctttactgtggttttcagtaatgggcggcaattgtaacgtttttttgggctggagcacgttttctctgacggttacactgataagaaataatttcgtgtggatctacagagtcatggaactgaaagcgacaacgcttggaaaacgtctggcacagcacccttacgatcgggcggtgatcctcaatgccgggattaaagtctccggcgatcgccacgaataccttattcctttcaatcaattactggcgattcactgtaagcgcggtctggtatggggcgagctggaatttgtactgccggacgaaaaagtggtgcgtctgcacggcaccgaatggggcgagacgcagcgtttttaccatcatcttgatgctcactggcggcggtggagtggcgagatgagcgaaattgcgtctggtgttttacgccagcaactggatttgattgccacgcgcactggggaaaataaatggctgacgcgtgagcaaacctctggcgtgcagcaacaaatccgccaggctttgagcgcgttgccgttgccggttaaccgactggaagaattcgataactgccgtgaggcgtggcgtaaatgtcaggcctggttgaaagatattgaaagcgctcggttgcagcataaccaggcgtataccgaagccatgcttaccgagtatgcggattttttccgccaggtcgagtctagtccgctgaatccggcgcaggcccgggcagtcgttaatggcgagcattctctgttagtgctggcaggtgcaggaagcggaaaaacgagcgtgctggtggcccgtgcaggctggttgctggcgcgtggtgaagcgtcccctgagcaaattttattgctggcgtttggtcgcaaagccgctgaagagatggacgagcggattcgcgaacggctacataccgaagacattaccgcacgcacgtttcatgcgctggcgctgcatattattcagcagggcagcaaaaaagttccgatagtcagcaaactggaaaatgataccgctgcccgtcatgaactctttattgctgagtggcgcaagcaatgcagcgaaaagaaagcgcaggcgaagggctggcggcaatggctgacggaagaaatgcagtggagtgtgccagaaggtaacttctgggatgatgaaaaattacagcgtcgccttgcctctcgcctcgatcgctgggtaagtctgatgcggatgcacggtggtgcacaggcagaaatgattgccagtgcacccgaagagattcgcgatctgttcagtaaacgtatcaagttgatggccccgttattaaaagcctggaaaggtgcgctgaaggcagaaaacgctgtcgattttagcggccttattcatcaggcgattgtgattctggagaaaggtcgctttatcagcccgtggaagcatattctggttgatgaatttcaggatatcagcccgcagcgggcagcgttgttagcggcattacgcaagcaaaacagtcagacgacgttgttcgctgttggtgatgactggcaggcgatttaccgattcagcggtgcgcaaatgagcctcaccaccgctttccatgaaaactttggtgaaggcgaacgctgtgatttagacacgacttaccgttttaacagtcgtatcggtgaggtggcaaaccggtttattcagcagaacccaggccagctgaaaaagccgctaaacagcttaaccaatggagacaaaaaagccgtcacgttattggatgagagtcaacttgacgctttgctggataagctctctggttatgccaaaccggaagagcgcattctgatcctggcgcgttaccatcacatgaggcctgccagcctggaaaaagcggcaacacgctggccgaagttgcaaatcgactttatgaccattcatgccagcaaagggcaacaggcggattacgtcatcatcgttggcttgcaggagggaagtgatggttttccggctgcggcgcgggagagcattatggaagaggcgctactgccaccggttgaggatttcccggacgctgaagaacggcggttaatgtacgtggcgctgacccgggcacgccatcgggtatgggcactgtttaacaaagagaatccctctccctttgtggaaatactgaaaaatctggatgtgccggtggcgagaaaaccgtaagaaacaggtggcgtttgccacctgtgcaatattacttcagacggtccgcgagataacgctgataatcggggatcagaatatcgaccgcgtcgttgaaatgcgggctctggattatgaagtctgccgttgccacgttggtggcgaccggaatgttccataccgtcgccagacgcagcaaggctttcacgtcaggatcgtgcggcacggcatttagtggatcccagaagaaaatcaatacatcaattttcccttcactgatcaatgcgccaacctgctggtcaccccccattgggccactcaacatcgcgttgacgttcatgccggtcgcgcgggaaattaagttaccggtagtgcctgttgcatacagtacgtgttgttccagtaacggttgatgccgttccacccagctcatcagcatttgtttgcagtgatcgtgtgccaccagcgcaatatgtttccgcgcaggtaaagtgcgagtcgtcagttccataatgtacatccgtagttaactttcctacagattactgtaagcacttatcgctgcaagataaagaccgaaaaagcctgcgcacaggcacaaaaatctcaggaagatggttgtttttccgcccactgcaggaaagtatttcgcgtttgtgggtcagccagtttaaaccaatacttcagccgttgttctgtgagcacctgagactgcggtggaatagcatccagctcggaaacaccgctaagcagcgtactgtcatctgccatcatcgtggcaaattgcggtagactagcgcgtttcgcggatttgttatagcgttcaacctcgacctcataatcaatcgtttttgccgtactggtaatggcgagaatatccagctttaccggaatcggcgtcgcatcgccatccaacaattcaaggcgcggcgcggcatcaaaatggttagcttcccgctcattctccaggcgaggcaggcgaaaattgacctggttgatgagctgggtattaaaactgaccaccagcggtggggagatatacagccgttcttcactattggaaagatgaatcgtcttctcaacgcgaaacactaactgatgcggtccattatccagttcaatgctgtccgcaccgcgcagcagagagctggaaaccttcttgccgtcgagtaccagaagatcgacatcggtactaagccgcagcgtggtggcaaaaacggataccggcaaacataatgcaatcaaggtggtcacgatgccggttttcataggtagctcctgtcaaaagaccgcccgaataataatgtgtcaaaatttttctttaatcatacttactaacatatagacatatttcccgcttttgctctcattcattcgtattagctgcatggttggcatgtcggctttgtcgtacactttgttaaacagtctggaggaaataatgaaagaaaccgatattgcaggcattttaacgtccactcacaccattgcgctggtgggggcaagcgacaaacccgatcgtcccagctatcgcgtgatgaaatatctactcgaccaggggtatcacgtcattccggttagcccaaaagttgccggcaaaacgctgctgggccagaaggggtatggcacgctggcagacgttccggaaaaagtcgatatggtcgatgttttccgtaatagtgaagcggcgtggggcgtggcacaggaagctattgccattggcgcgaaaactctctggatgcaactgggggtgattaatgagcaagcggcagtactggcacgggatgccgggttaaatgtggtgatggatcgctgcccggctattgagatccctcgcctgggcctggccaaataaaaaatccccggaaggcaaaaaccttccggggatttgttcagggattagttacgcagacgcggggcctggagttgtttgcggatggtctgcgccagctcatccatggatggctgttcaggatgttcatcctgcaattcgctacttagctgggcttcagccaggtaggtatgaaccggtaggccgttatcgtcctccatcactacgtgataccacggagcggcgcgaagctcgtcattcaccgccagctcatcagggctcggttcagagaggctataaaccgggtcgatatccacgaccactccgagataacctaacagggaatggcggacctgctggccgataccgaatttgctggcaatcatagtcacctcccgggaaatctttacctttgatataagggtaaaattccacatttcaagttacatgacgcgacaggcaaaccctttcagatatagcccttccggataggtagcgatcaccggatgatcggctgcctgacggaactgctctataaattgtacatcacgaccggcatcaattgcggcatccgcgatgattttctgaaataaatcgctggtcatcagaccggaacaggagaaagtcaggagaataccgccttcattcagcagctgaatcgccagcatgttgatgtctttataaccacgacacgcgcccatcaactggcttttattctcaacaaacttcggcgggtccatcacgataacgtcaaatttttcaccgcgatcgcgataagtacgcagcaatttaaagacatcatcacggacaaactcagccttgctcagatccagtttgttcagctcaacgttctgccgtgcaatatccagcgcttcctgggaggtatcaacgctgacaacctggctgcaaccgcccatcagtgcgcttacggcgaaaccaccggtataggagaaacagttcagcacacgtttattttcaacgtagcggcgggtagccaggcggctatcacgctggtccaggtagtagcccgttttgtgtccgtgctgaatatccaccagcagtttcattccgtgttcttcaatcggcagcagggcaggtggcaactcgccggtgacggggccctgggtcagctccattccttcttttttacgtaccgcgacgtcgctgcgatcgtaaatgctacattccgggtacagcgtttgcagggcactaattaatgccgcgcgctgatattctgccccagcactcagcagttgcagcaccagaaaattaccgaaacgatcgatagtaatacccggcaggccatcagattctccggcgattaaacgatagctgtcgaggccatctttttgcgccagccagtcacgccatttttgtgcttgttgcaaacggcgggaaaaaaaagcaatgtcgatagactcagacgggtcaaacgtccagacgcgcgcccggatttggctagctgggctataagcgccgcgtgctaaccattttccctgatgatcaacaatatcgatggtttcaccgaggctggctttaccttccatgcgggcaacggccccggaaaagacccacggatggcgacgaagtaatgatttttcgcgccctttggctaacactaaacgtacactcataatttacttttctgtcgatgcaaagaaatgggcgtcattgtccggagttttccatggatttgcaacgcgtccattaaggataaggagagcagcaatgagcaaagtctgcataattgcctgggtttacgggcgagttcagggcgtaggatttcgctacaccacacagtacgaagcgaaaagactgggtttaaccgggtacgccaaaaatcttgacgatggcagcgtggaagtggttgcttgcggtgaagaagggcaggtggaaaaattaatgcagtggttaaagagtggcggcccgcgttctgcgcgtgtagaacgggtgctcagcgagccgcatcatcccagcggggaattaaccgattttcgtatccgttaaatacattttaccggttttggcaggccagcaattttggtggcttgcttagccggacctttcggaaacagtcggtataaatagcggctgttacctttttcttcgccaaatttattcgccatcgcttttaccagcatacgaatcgccggagaagtattgaattccagatagaaatcacgcacaaaacgcaccacttcccagtgttccggactcaggctaatcccttcgttctctgcaatcaccacagccagcggctcactccactggctgctttctttgagatagccttcggtatccgtttctatctctttaccttcgaagatcagcataattattactaccttaatcagactggcggcagtgtaacaaaaaacaaagccccgcataaagcgaggctatgaaagtgttagcgggtgagattaatcgcggctagcgaagcccagaatgctcagcaggctgacgaagatgttgtacaggctaacatacaggctaaccgtggcacgaatatagttcgtctcaccgccatgaatgatgttgctggtttcaaacaagatagcgccagaggagatcagaatgaagaccgcgctgatcgccagatgcagagcaggcagctgcaggaagatattcgcaaccataccaatcagcaccaccacaatacccgccatcagcataccgccgaggaagctcatatctttgcgggtggtcagcacatatgcagagcagcagaagaacactaacgccgttccgcccagtgccatagcgattacgtcacccattccggcagacagataggtgttcagaataggtccgaggatataacccagaaaaccggtaaaggcgaatgcggagataatcccggtcggcttattcgccgttttataggtcaggaacatcaaaccatacatacccaccagcgtcagaatcagacccggagatggcagcatcagcaccgtactggcagttgcggtaatcgcgctaaaggccagcgtcaggctcagcagaaaataggtattacgcagcaccttatgggtgctaagcagacttgtacggtcatgactagaactaacaatacgatccattgagtcactctctatgacagatgtaattaattaagcagcataatgataatgcgtaagggcacccagaagttttacccatctttacgcatttgatctggaacaggtttaacagcggattatcaggtcattaagcaaatataacgccctgagaatttcgacaggcaaaagaaaaaggggttagcatttagctaaccccttatcttattggaatgacgcgcactataaacatcccgatgcggcgtgtaaacccctaatttgtttgtttgcctgaaaaacagccaaaagtgcattgatagcgtgaaataacagcagattgatcatttcatcaccatgaattccttctcttttactcgtttagcaaccggctaaacatccccaccgcccggccaaaagaaaaataggtccatttttatcgctaaaagataaatccacacagtttgtattgttttgtgcaaaagtttcactacgctttattaacaatactttctggcgacgtgcgccagtgcagaaggatgagctttcgttttcagcatctcacgtgaagcgatggtttgccttgctacagggacgtcgcttgccgaccataagcgcccggtgtcctgccggtgtcgcaaggaggagagacgtgcgatatgaataacgaggaaacattttaccaggccatgcggcgtcagggcgttacccggcgcagctttctcaaatattgtagtctggctgccacgagcctgggattaggcgcgggaatggcaccaaagattgcctgggcgctggagaacaaaccgcgcattccggtggtatggatccacggtctggaatgcacctgctgtaccgaatcttttatccgctccgctcacccactggcgaaggacgtcatcctttccctgatttccctcgattacgacgatactttgatggctgccgccggaacccaggcggaagaagtctttgaagacatcatcacgcaatacaatggcaaatatatcctcgcagtagaaggtaatccgccgctgggcgagcaggggatgttctgtatcagcagcggtcgaccgtttattgagaaactcaaacgtgccgctgccggagccagcgcgattatcgcctggggaacctgcgcgtcctggggctgcgtgcaggccgcgcgacccaatccgacgcaggcaacgcctatcgacaaagtcatcaccgacaaacccattatcaaagtacctggctgcccgccgatcccggatgtgatgagcgccatcattacttacatggtgacctttgatcgcttgccagatgtcgacagaatgggccgtccgctgatgttctatggtcagcgaatccacgataaatgctatcgccgcgcccacttcgacgccggagagttcgtccagagttgggatgatgacgctgcccgcaaaggttactgcctgtacaaaatgggctgcaaagggcctaccacctataacgcctgttcctccacacgctggaatgatggcgtttctttcccaatccagtctggtcacggctgcctgggctgtgcggaaaatggtttctgggatcgcggtagcttctacagccgcgtggtcgatattccgcaaatgggtactcattccaccgccgataccgtcggtttaaccgcgcttggcgtggtggcagcggctgttggtgtgcacgcagtcgccagcgccgttgaccagcgcagacgtcataaccagcaacctacagaaaccgaacatcagccaggcaatgaggataaacaggcatgagcactcagtacgaaactcagggatacaccatcaataatgccggacgccgcctggtggtcgacccgattacgcgcatcgaaggccacatgcgctgcgaagtgaatattaacgatcagaatgtgatcaccaatgccgtctcctgcggcaccatgtttcgcgggctggagatcatcctacaagggcgcgacccgcgcgatgcgtgggcgttcgttgaacgtatctgcggcgtctgtactggcgtacacgccctggctagcgtttacgccatcgaagatgctatcggtattaaagtgccggacaacgccaatatcatccgcaacattatgctggcaacgctctggtgccacgatcatctggtgcacttctatcagcttgccgggatggactggatcgatgtgttagatgcgctgaaagccgacccgcggaaaacttccgaactggcgcaaagtctctcctcttggccgaaaagttcccctggctatttcttcgacgtacaaaaccgcctgaaaaaatttgttgaaggcgggcagttggggatcttccgcaatggctactgggggcacccgcagtacaaactgccgccagaagctaacctgatgggctttgcccactatctcgaagctctcgatttccagcgtgaaattgtcaaaatccacgcggtctttggcggtaaaaacccgcatccaaactggattgtcggcgggatgccttgcgccatcaacattgacgaaagcggcgcggtcggggcagtcaatatggaacgcctgaacctggtgcagagtattatcacccgcacggcggacttcattaacaacgtgatgatccccgacgccttagccatcggtcagttcaacaaaccgtggagcgaaatcggcactggtctttctgataaatgcgttctcagctacggcgcattcccggatattgccaacgactttggcgagaaaagtctgctgatgcctggcggcgcggtgattaacggcgacttcaacaatgtgctgccagtggatttggttgatccgcagcaggtgcaggagtttgtcgaccacgcctggtatcgatatcccaacgatcaggtcgggcgtcatccgttcgatggcatcaccgacccgtggtacaaccccggcgatgtcaaaggcagcgataccaacattcagcagctgaatgaacaggaacgctacagctggatcaaagcgccacgctggcgcggtaacgcgatggaagtggggccgctggcgcgcacgttaatcgcttatcacaaaggcgatgctgcgaccgttgagagcgtcgatcgcatgatgagcgcgttgaacctgccgctttccggtatccagagtacgttaggccgcattttgtgccgcgcgcacgaagcgcagtgggccgcaggtaagttgcagtatttcttcgacaagctgatgaccaacctgaaaaacggcaatctcgccactgcttccacggaaaaatgggaacctgcaacctggccgacagagtgccgtggtgtcggttttaccgaagcgccgcgcggggcgttaggccactgggccgccattcgcgatggcaagattgatctctaccagtgcgtggtgccgaccacctggaacgccagcccgcgcgatcccaaagggcagattggcgcttatgaagcggcgctgatgaacaccaaaatggcgatccccgagcaaccgctggagatcctgcgtactctgcacagctttgacccgtgcctcgcctgtagtacacacgtgctgggcgacgacggtagcgagctgatctccgtgcaggtgcgttaacagcgaaggagaatcatcatgcaacagaaaagcgacaacgttgtcagccactatgtctttgaagcgccagtgcgcatctggcactggttgacggtgttatgcatggcggtgttgatggtcaccggatactttatcggcaagccgctaccttccgtcagcggcgaggcgacgtatctgttctatatgggctacatcaggttaattcacttcagcgccgggatggtttttaccgtggttttgctgatgcggatctactgggcttttgttggcaatcgatactcccgcgagctgtttatcgtgccggtatggcgtaaaagctggtggcagggcgtgtggtatgaaatccgctggtatctgtttctggcaaaacgtccgagtgccgatataggccataatcccatcgcccaggcggcgatgttcggctatttcctgatgagcgtctttatgatcatcactggttttgcgctgtacagcgaacacagccagtacgctatttttgcgccgttccgttatgtggtggaatttttctactggacgggtggcaacagtatggacattcacagctggcatcggctggggatgtggctgattggcgcgtttgtgatcggtcatgtctacatggcgctgcgtgaagacatcatgtccgacgacacggtgatctccaccatggtcaacggctaccgtagccacaaatttggcaaaataagtaacaaggagcgtagttgagctaaataagtaacaaggagcgttcatgagcgagcaacgcgtggtggtcatggggctgggcaacctgctgtgggccgatgaaggcttcggcgtgcgggtggcggaacggctgtatgcccattaccactggcccgagtatgtggagattgtcgatggcggtactcagggactgaacttgctggggtatgtcgaaagcgccagccatctgttgattctcgatgccattgactacgggctggaacctggaacgctgcgaacctatgccggagaacgcattccggcttatctcagcgcgaagaaaatgagcctgcatcagaacagtttctccgaagtgttggcgctggcggatatccgcggacatctgccagcacatattgccctcgtcggtctgcaacccgcaatgctcgacgactacggcggtagcctgagcgaactggcacgggagcaactgcccgctgcggaacaggcggcgctggcgcagcttgctgcgtggggaattgtgccgcaaccggctaatgaaagccgctgtctcaattatgactgtctgagcatggaaaattacgaaggcgttcgcttgcgccagtaccggatgacacaggaggagcagggatgagcaacgacacgccatttgatgcgttgtggcaacgaatgctggcgcgcggctggacgccagtcagtgaatcccgtcttgacgactggcttacgcaagcgccagacggcgtggtgttattaagcagtgacccgaaacgcacgccagaggtcagcgataatccggtaatgattggcgaattactgcgcgagtttcccgactatacatggcaggtggcgattgctgaccttgagcagagcgaagccatcggcgatcgctttggcgtctttcgctttcctgccactttagtgtttaccggcggaaactatcgcggcgtgctgaatggtattcacccgtgggcggaactgataaacctgatgcgcgggcttgtcgaaccgcagcaggagcgtgccagttgatctaaccgcagcaggagcgtgcctcatgagcgaaacttttttccatctgctggggccaggaacgcaaccgaacgatgacagtttcagcatgaatccactgccgatcacctgtcaggtgaatgatgaaccgagtatggcggccctggagcaatgtgctcacagcccgcaggtgattgcgctgttaaacgagttacaacatcaactaagcgaacgccaaccgccgttgggcgaggtgctggcagtcgatctgttaaatctcaacgccgacgatcgtcactttatcaatacgcttctcggggaaggggaagtgagtgtgcgcattcagcaggctgacgacagtgaaagtgaaatacaggaggcgatcttctgcggattatggcgggtgcgcagacgtcgcggcgaaaagttgctggaggacaaactggaggctggctgcgcgccgctggcgttgtggcaggcggcaacgcaaaatctcttgccgacagatagcctgttaccgccgcccattgatggcctgatgaatggcctaccgttggcgcatgagttactggcacatgtacgtaaccccgacgcgcagccgcacagcattaatctgacgcaattacccatcagcgaggctgatcggctttttctcagtcgtctctgtgggccgggaaatattcagattcgtaccattggctatggcgagagctatatcaacgccacggggttacgccatgtctggcatttacgctgtacggacaccttaaaaggcccgttactggaaagttatgaaatctgcccaataccggaagtggtgctggcagcgccagaagatttggtcgactctgcgcagcggcttagcgaggtatgtcagtggctggcggaagctgcaccgacgtaaaaagacggtaagtatcgctttcagtcttatgaatatcgcaatcggcgaatacctctggtcgtagagtttcaggataaagagggagatctaccattatcgggttatttttctctcttcgcctacaggagtgcgcatgtgggatgtcattgatttaagccgctggcagtttgctctgaccgcgctgtatcactttttatttgtaccccttaccctggggctgattttttttgctggctattatggaaaccatttacgtggtcaccggcaaaacaatctaccgcgatatgacgcgcttctggggtaagctcttcggtatcaattttgctcttggcgtggctaccggcctgaccatggagtttcagtttggtactaactggagtttctattccaactatgtgggcgatatttttggcgcaccgctggcgatggaagcattaatggccttcttcctcgaatccacctttgtcgggctgttcttcttcggctggcaacggctgaataaataccagcacctgctggtgacgtggctggtggcgttcggtagtaatctctctgcgttgtggatattgaatgccaacggttggatgcaatacccgaccggtgcgcattttgatatcgacaccctgcgtatggagatgaccagcttcagcgagctggtctttaatccggtcagccaggtgaaatttgtgcacaccgtaatggcgggctacgtgaccggggccatgtttattatggcgatcagcgcctggtatttactgcgcggacgggagcgcaatgtcgcattacgcagctttgccatcggttccgtcttcggtactctggcgattatcggtaccctgcaactcggagacagttctgcgtatgaagtcgcgcaagtacaaccggtaaaactggcggcgatggaaggggagtggcaaacggaacctgcacctgcaccgttccatgtggttgcctggccggaacaggatcaagagcgtaacgcctttgccctcaaaattcccgcgctgctagggatcctcgccactcacagtttagataaacccgtgccgggtctgaagaatttgatggctgaaacctacccacgcttgcaacgcggacgtatggcctggctgttaatgcaggaaataagccaaggcaatcgtgagccgcatgtgttgcaggcattccggggactggaaggtgacctgggctacggcatgttgctctcccgctatgcgccggatatgaatcatgtcacagccgcacagtaccaggcggcgatgcgtggcgcgatacctcaggttgcgccggtattctggagtttccgcatcatggtgggctgtggttccctgctgctactggtgatgctgattgcgcttgtccagacgctgcgtggcaaaatcgaccagcatcgctgggtgctgaaaatggcgctctggagtttgccgttgccgtggattgcgattgaagccgggtggtttatgaccgagtttggtcgtcagccgtgggcgatacaggacatcttaccgacatactccgcgcactccgctttaaccacaggacaactggctttcagtctgatcatgatcgtagggctttacaccctgttcttaatcgccgaagtctacctgatgcagaaatatgcccgtctggggccgagcgcgatgcagagtgaacaaccgacgcagcaacaggggtaaaggagaaaatcatgtttgattatgaaacattgcgcttcatctggtggctgctgattggcgtgatcctggtggtctttatgatctccgacggatttgacatggggatcggctgtctgctgccgctggtggcgcgtaatgatgatgaacgccggatagtgataaacagcgttggtgcacactgggaaggcaaccaggtctggttgatcctcgctggtggggcattatttgccgcctggcccagagtgtatgcagcggcgttttccggcttttatgtggcgatgatcctggtgctgtgcagtctgttcttccgcccgctggcctttgattatcgcggaaaaatcgccgatgcacgctggcgtaaaatgtgggacgccggtctggtcatcggcagtctggtgccgccggtagtcttcggtatcgccttcggcaacttgttgctcggcgtgccgtttgccttcacaccgcaattacgcgtggagtatctcggcagcttctggcaactgctgacgccattccctttattgtgcggattgctcagccttgggatggtgattttgcaaggtggcgtctggttacaactgaaaactgttggtgtgattcatctgcgtagtcagctggcgaccaaacgcgctgcactgttggtgatgctgtgctttttgctggcgggttactggctgtgggtcggtattgatggctttgtactgctcgcccaggatgctaacggtccttccaatccgttaatgaaactggtggcagtgctacctggtgcctggatgaataattttgtcgagagccccgttttgtggatcttcccgctgctgggattcttctgcccattgctgacggtgatggcgatttatcgtggtcgcccgggttggggatttttgatggcaagtttgatgcaatttggcgtgattttcacggcaggcatcacgctgttcccctttgtcatgccgagtagcgtgagtccgatctccagcctgacgttgtgggacagtacttccagtcagctgacgctgagcattatgttggtaatcgtgctgatatttttgcccattgtgttgctctacactctctggagctactacaaaatgtgggggcgcatgacaacagaaactctccgccgtaacgaaaacgagttgtactaaggagcagaaacaatgtggtatttactttggttcgtcggcattttgttgatgtgttcgctctccacccttgtgttggtatggctggacccgcgtctgaaaagttaacgaacgtaggcctgatgcggcgcattagcatcgcatcaggcaatcaataatgtcagatatgaaaagcggaaacatatcgatgaaagcgatcttaatcccatttttatctcttctgattccgttaaccccgcaatctgcattcgctcagagtgagccggagctgaagctggaaagtgtggtgattgtcagtcgtcatggtgtgcgtgctccaaccaaggccacgcaactgatgcaggatgtcaccccagacgcatggccaacctggccggtaaaactgggttggctgacaccgcgcggtggtgagctaatcgcctatctcggacattaccaacgccagcgtctggtagccgacggattgctggcgaaaaagggctgcccgcagtctggtcaggtcgcgattattgctgatgtcgacgagcgtacccgtaaaacaggcgaagccttcgccgccgggctggcacctgactgtgcaataaccgtacatacccaggcagatacgtccagtcccgatccgttatttaatcctctaaaaactggcgtttgccaactggataacgcgaacgtgactgacgcgatcctcagcagggcaggagggagtattgctgactttaccgggcatcggcaaacggcgtttcgcgaactggaacgggtgcttaattttccgcaaagtaacttgtgccttaaacgtgagaaacaggacgaaagctgtagtttaacgcaggcattaccaagcgaactcaaggtgagcgccgacaatgtcagtttaaccggtgcggtaagcctcgcaagtatgctgacggagatatttctcctgcaacaagcacagggaatgccggagccggggtggggaaggatcaccgatagtcaccagtggaacaccttgctaagtttgcataacgcgcaattttatttgctacaacgcacgccagaggttgcccgcagccgcgccaccccgttattagatttgatcaagacagcgttgacgccccatccaccgcaaaaacaggcgtatggtgtgacattacccactagtgtgctgtttatcgccggacacgatactaatctggcaaatctcggcggcgcactggagctcaactggacgcttcccggtcagccggataacacgccgccaggtggtgaactggtgtttgaacgctggcgtcggctaagcgataacagccagtggattcaggttagcctggtcttccagactttacagcagatgcgtgataaaacgccgctgagtttaaatacgccgcccggagaggtgaaactgaccctggcaggatgtgaagagcgaaatgcgcagggcatgtgtagcttggcaggttttacgcaaatcgtgaatgaagcacgcataccggcgtgcagtttgtaatgcataaaaaagagcattcagttacctgaatgctctgaggctgatgacaaacgaagaactgtctaatgcgtagaccggaaaaggcgttcacgccgcatccggccactttcagtttgcaatacgtacgcttgagatcaggattgtctactttgagtataacatccttgtgaaatctccctttcctcataccgcttgcactatatactgcgggtaggaaaggcgcgcagagggaaatataagattgttaactatccccctctggaaatacgacttgtgagcataagataaatcttagcaaaatacaaattaaagataaggaaattgttacgaaagctattaattattgttggtaatatagtttcaagtggtactataactggctgttaaatggcatttataactattaggtgcagagatattcgcttaaatggattagtttctttgtggaaaagtaactgatgttataatgtatgatgttgactatttcactattccaataaaaccagtcagctttaaacaagcagcgtcatattaagagagataaacatttgccgctgttggtcctcgcaggccatttacgcggcaaaattccacacgtaatcctggtataagcacttctgcgtcgcggggagtgaatgcggaaatatggacctgaacttctttacgaccgtcggaggggataatgaatcctttgccgcttttgcgatcaaaggttttgacaattcctgtcattttacgggacaaacaaattccttactgaaaatactgcgctgcactatacggggttaataaaataaagccagcgatatttaagaccgccggacggctaaaataaaatttgcttaatctcaattatcatgcgttaatagctgcgtcggtttgaaagacagacagcatacaaagtagtttactaaagcagttctcattatcaggcattatccccttcttttgagtctctctcctgaacactaagtagtttctgtattaaagccctgtttgccgaaaggcccaaaatgaaggaagtaaaatatgtctaataaaatgactggtttagtaaaatggtttaacgcagataaaggttttggctttatcactcctgatgatggcagcaaagacgttttcgtccatttcaccgccatccagagcaatgaattccgcacgctgaacgaaaatcagaaagttgaattttctattgagcaggggcaacgtggccccgcggcagcgaacgttgttacgctctaaggttgccattattactcaacatctccatttccgctgtccatgttgtcatggttcacagtaccgcacatcggcattcgatgtgacggagcgaaaccctttgggcgctaagtgtattttttgtaaatcgacgatgatcacctttgataacgtcgcgctgcaaatacgcactgaccatgcgccgctggattagtcaaaataatatcaggctccctcgtggagccttttttatatctgccttatttttcttcaacgctgtatgtatagtaagcgataacctgttgattattgaatctttcggggagatggcttataacatttcttacctgaccagggtaccgggaaccaacaccttactggcgtgttgctgtcttttaagaccagaagaggttaacagtgaatattgaagagttaaaaaaacaagccgaaacggaaatcgccgactttatcgcgcaaaaaatcgccgagctgaacaagaatacagggaaagaagtctctgaaattcgcttcaccgcacgagaaaaaatgaccgggcttgaaagttatgatgtcaaaatcaaaataatgtgattttgtgaacatcaccccgtgcgaggtgatgttccgcttgttgctaatttagtgaccaatcattggcgcttgtggaattaagcgtcggtacaattcctccggcaccgggctttgccatactcccgcatacattgcgtaaccaatcaccgcaaacataatccccagaaccagtagcgtcattaaccagccagacaacgcaaaggcttttttatttgccgcaggtttttgcagactaaaggtcaatgtactggctaccggacaactctctacgcaagtcatacagccggtacattccactgttcgtacctgaattaatttatcgaccgggatccgacttgggcaattttttgcgcatttgccacagtcgatacaactttcggcattgcgacgaatcttaaacgggctcaataggctaaccacgcccatcagcgcgccatatgggcaaagataacgacaccaggcatggcgaataaacaggctggcaatcagcaaaacggtcacgctgattaatgtcgcggtccccatatgacgaaagaaatcgagcattttaacgtccatcaccacgctgtaggggctcaacataaaatagtgaatcgcctgagcgggcatcaataacgcgatatagataaaaaaactcaacagcaaatacttcacgccgcgcagaggaatatccagccagcggggaaggacacattgccgaccaaacagtttgttaccgagatcgccgattaattcagaaagcgtaccaaccgggcataaccaactgcaaaaggcctttttgagtaatagactgatgacgataaaagcgaccaataacagcatcgcggcggcgtggacggacggtaactgacctgttacaaggctatatttcagattcatcagcccggcaatcggtagccagccttcgatacctcccggtctggcgacaaatgtcgtgctacttgccgtttcgtaatagcgcacccaataccagaacgtgatggcaatataaatattcattgccaacagtaataattgcgtcgctttacgccaggtcgtggcattacgccagtcattccacggtaatttgccgcccgtcgtgcctggccgccgctgccagcgggttcttttattctctgccatgattttgccagtccgttaagttgtataccaaatgccactattctagttgttcttaactggctgatattgattcaaatcgcgttcaggtctttcttatgcaaccatgcttccagagcggcaacactgcgtgtaatttcttcgtgtggaaggggggcagataatggctgctgctccagttgtgcgcatagctggctggcgatatgcattcccagactgctgcaactgctttttagctgatgcgcggcacgctttattttctcgctatcctgactggcgcgggcaatgtcgatttcatcgagaagcggcagggcatgttgtgtaaataataccagccattcgtggatcttctccgtccccattaactgagcatcttcattgagttggcttacatccaggctttgatcattattgacttgcagttggagatagtgcgccagtaactgaccgagcacttcacgcggcaccggtttagggataatcccgcggaataaactactggtacgctggcgcagcgtttcgtcaatgacatgggcgctaaagccaatcaaaaccaggctcggatattgctgtgccagttgtcgggcaagcgtaatgccgtcgatatccggcagatcaaaatccaccagtgcggcagcaaacggttcgctattttgcagtgtctctaaagcctgcgcggcattgccaacagcaacaatctgcgcaccactggttttcagcatctcaatggtaattcgctgggttagcgggttatcttcaattaacagcaaacgtaaaccgtcaagacgcaccgcctgattgactgtttttggcacgggtgccgtggcaacacgtaacggcaagcgtaaacaaaaacagcttccaacctccggcgtgctggtggcgctcagttcgccgcccatcgcctgggccagacggctactgatagtcagtcccagcccggtgccgccgcgtttgccgcttacctgcacaaatggctggaagatttctgccagtttcgcgggatcaataccgcagccgctgtcttccacttcgaccagccattgctcgccatcagtgcgactacgcaggataatgtacccttcgtcagtaaaacgcagggcgttgctcaacaggttggttataacctgacgaatacgtcgtggatcgcccattaacgcgcacggcatatcatcggcaattgccgttgccaggcgaatcgggcgacctttcacccgtccgctcattaattgcagggtactttccagcagcgggcgcggttcaaagggctcatcgctgacgctaacattcttgccacctgcttcgatagcggaataatcgagaatatcgttgaggatggtcagcaagctttcaccagagtcagtaattgcccgcaaatcatcacgctgggcgttaagtgcggggttatctgccagcagttgagcagtgccgagaataccgtacagcggtgtgcggatctcatggctcatcgccgccagaaacgcgctttttgcctggctggctttttctgcttccgcccgtgcctgtcggtgttctatcaccagttcctgcaattcagctgtacgcgctttgacctgcgccgccagctgttcgcggtggcgattcagtgcatgaacattgctgcgaaacgcatccatcagccgcccgatggtatccagctcccgtacgccagcggtttccgggaaaggggagtcaatatcaccgtccagcagccgttgcagcgcctgcgtttgttcggcaagtggacgcgtgacactgcgataaaccacgcgccagaggatcagaatcagtgcgcaaagactaaccatccccagcaataacaggctgtattgcccgcgtgcactcgctttttccagatgcgccagtccgtgctgattacgcagctcaatggtgtcgaccagctgactgacttcgctactaaactgcgcgaactgggcgatgttattttgtgcgagagtttgtaggtgattgctgatttcactgtcctgctgatacagcgccagcaaatcgctatattggctaacggtagttaacgttgttgcgacctgcgcacgaacacccggatcttcaatgcgtatttgccgacgttgcagaattttcaccgcattattgagctgcttttccagcgttggtgcatttttctggatctgctccagccccagattcatcaccatttgctgcacccgcagagcgctaaggcgcagttcattcatctggttaacatactcaagatcgatatcaatcagccgatcgagtgcactttcagcagcctgacgctgatcttgttcgatcaaatcgtaaatcccggcctgggtcgctccagcggaagttgtcgcattattcgcctgaccttgcgccaggcgtgcgatctcatcggcggcagcgactatctgctgactgagttgctgttgttgctggcgcagttgcaaacgctgccccaccagttccccttgctgacgtaagctacgggagatctcctgctcctgttgttcaatagcggtggtatcaaaaccttgttcccgtaacgcttgcagcaacgcattaatcttcaggctttgtgcggtgagcattcgcccctgcgcctgccacatcttttcgttatcggcactggtcaggttctgcgcggcgaaaagttcccaggcgctggcttcgctcaactggcgcgccatattcatggtaggaatcaatgcctgagtgttgtctttttccacctggctgataaagcgcaggttgtaccatcccaccagggtactggtcagggttaacagcgccatcagggcaaagcccatccagagtcttcgggtcagggttaaattcacggtcggtgcactttaggtgaaaaaggttgagtcgcaaagcggaatgcatctagcataaagccttattattgatgaggctatcatgcgcgtactgctatttttacttctttcccttttcatgttgccggcatttagcgctgataacctgttgcgctggcatgatgcgcagcatttcacggtgcaagcctctacgccgcttaaagccaaacgcgcatggaaactgtgcgcgctttatcccagcctgaaagatagttattggttaagcttgaactatggtatgcaggaggctgctcgccgctacggtgtggatttaaaagtgctggaggcaggcggctacagccagttggctacccagcaagcacaaatcgaccagtgtaaacagtggggcgcagaggccattttgctcggtagtagcacgaccagttttcccgacctgcaaaagcaggtagcaagtctgccggtgatcgaactggtaaatgctattgatgctccccaggtgaaaagccgcgttggtgtgccctggtttcagatgggctatcaaccggggcgatatctggtgcaatgggcgcacggtaaaccactgaatgtgctgttgatgcccggacccgataacgccgggggcagtaaggagatggtcgagggttttcgcgcagccattgccggaagcccggtgcgtattgttgatattgcgcttggtgataacgatattgaaatccagcgtaacctgttgcaggagatgctggaacgccatccagaaatcgacgtcgttgccggaacggccattgcggcagaggcggcaatgggggaagggcgtaacctgaaaacgccgcttaccgtggtgagcttttatcttagtcatcaggtgtatcgcgggctgaagcggggaagagtgattatggctgccagcgatcaaatggtctggcagggggaactggcggttgagcaggccatcaggcaattacaggggcaaagcgtttctgataatgtcagcccaccgattttagttctgacgccgaaaaatgccgaccgtgaacatattcgccgcagcctgagtccagggggatttcgtccggtctatttttatcagcacacaagtgcggctaagaaataatcagcacacatcagcggctaagaaataaccttcaccatgttgcgtcaccagtaaatccgcgctgagtttatgacgtaaacgacgaattaacacatcgacggtgcgcaggtcagggttttccacccgacgcgcagaaagcatacgtagcagacgttcacggctgagaatttcgcccggattcgtcacaaatgccaccaacatttcatactctgcgcgggtcagtttaatcggctcgccatcccgctccagcgtatggcggctcacattcaggcaataaccggcaaagcgatagcagttgtcctgagtgtgcggttgagcttgtcgcgcgaggtcgattcgccagagcagatttttcacccgtactaccagttcgcgcagttccagcggtttggtgacgtaatcgtctgcgcccatttccagcccaacaatacggtcaatccgatcgctgcgtccggtaaccagaataatccccaccgtactgcgttctcgcagggcgcgggttaacatcaggccattttcatcgggtaagttgatatccagcagaattaaatctacgctctgattctgcataatttcccgtagcccagcaccgctcgccgtaacggaaacggtatacccctcctgagtgaagtaggattgtaatcgcgcctgggtaaccggctcatcttcaacaataacaatgtgatgtggcatcagagggttttactcattctgttcatatctgttcatattctgccgtaagccgttcatcctgaccagtgccgctgttcatatttgctcattaagatcgcttcactaaaccataattctacaggggttattatgcggaaactctggaacgcgctacgccgacccagtgctcgttggagcgtactggcgctggtcgcaattgggattgtgattggcattgcgctgattgtattgccacacgttgggatcaaagtcaccagcacaaccgaattttgtgtcagttgccacagtatgcaaccggtgtatgaagaatataaacagagcgtgcatttccagaacgcctccggcgtgcgagctgaatgccatgactgtcatatcccgccggatattccaggcatggtgaagcgcaaactggaagcgagcaatgatatctaccagacctttattgctcactccattgatacacctgaaaaattcgaagccaaacgcgcggaacttgccgagcgtgaatgggcgcgaatgaaagaaaacaacagcgcaacctgccgctcctgccataactacgatgcgatggatcatgcgaagcagcatcctgaagcagcacgtcagatgaaggtggcagcgaaagataatcaatcctgcatcgactgtcataaaggtattgcccaccagttaccggatatgagtagcggcttccgtaagcagttcgatgagctgcgcgccagtgctaatgacagtggtgacacgctgtactctattgatattaagccaatttatgcggcgaaaggcgataaagaagcctctggttctctgctgcctgctagcgaagtgaaagtccttaaacgtgacggcgactggctgcaaattgaaattaccggctggacggaaagcgccggacgtcagcgtgtactcacccaattcccaggtaaacgcatctttgttgccagcattcgtggtgatgtgcagcagcaggtaaaaacgctggagaaaaccaccgttgccgacaccaataccgagtggagcaagttgcaggccactgcgtggatgaagaaaggcgacatggtgaacgatatcaaaccgatctgggcttatgcggatagcttgtacaacggcacctgtaaccagtgccacggcgcaccggaaatcgcccactttgacgctaacggttggatcggcacgctcaacggcatgattggctttaccagtctcgataaacgtgaagaacgcaccttgttgaaatatctgcaaatgaatgcgtctgacaccgcaggtaaggctcacggcgataagaaggaagaaaaataatgaacaataacgatctctttcaggcaagtcgtcggcgttttctggcacaactcggcggcttaaccgtcgccgggatgctggggccgagtttgttaacgccgcgacgtgcgactgcggcgcaagcggcgactgacgctgtcatcagcaaagagggcattcttaccgggagccactggggggctatccgcgcgacggtgaaggatggtcgctttgtggcggcaaaaccgttcgaactggataaatatccgagcaaaatgattgccggattgccggatcacgtacacaacgcggcgcgtattcgttatccgatggtacgcgtggactggctgcgtaagcgccatctcagcgatacctcccagcgcggtgataaccgttttgtgcgcgtgagctgggatgaagccctcgacatgttctatgaagaactggaacgcgtgcagaaaactcacgggccgagtgccttgctgaccgccagtggttggcaaagcacggggatgttccataacgctagcgggatgctggcgaaagctattgccttgcatggtaatagcgttggtacgggcggagattactctaccggtgctgcgcaggtgatcctgccgcgcgtagtcggtagcatggaagtgtatgaacagcaaacctcctggccgctggtattgcagaacagcaaaaccattgtgctgtggggctccgatttgctgaaaaaccagcaagcgaactggtggtgcccggatcacgatgtttatgaatattacgcgcagctaaaagcgaaagtcgccgccggtgaaattgaggtcatcagcatcgatccggttgtcacatccacccatgagtatctggggcgcgagcatgtgaagcacattgcggttaacccgcaaactgacgtgccgctgcaactggcgctggcacatacgctgtacagtgaaaacctgtacgacaaaaacttccttgctaactactgtgtgggttttgagcagttcctgccgtatctgctgggtgagaaagacggtcagccgaaagatgccgcatgggctgaaaaactgaccggcattgatgccgaaaccattcgtgggctggcgcggcagatggcggcgaacagaacgcaaattattgctggctggtgcgtgcagcgtatgcagcacggtgaacagtgggcgtggatgattgtggttctggcggcgatgctggggcaaattggcctgccaggtggtggttttggttttggctggcactacaacggcgcaggcacgccggggcgtaaaggcgttattctgagtggtttctccggctctacgagcattccgcctgttcacgacaacagtgactacaaaggctacagcagcactattccgattgcccgttttatcgatgcgatcctcgaaccggggaaagtgatcaactggaacggtaaaagcgtaaaactgccgccgctgaaaatgtgtatttttgccggaactaacccattccatcgccatcagcagatcaaccgcattattgaaggcttgcgcaagctggaaacggttatcgccatagataaccagtggaccagtacctgccgctttgccgatatcgtactgcctgcgaccacgcagtttgagcgtaacgatctcgaccagtacggcaatcactccaaccgtggcattatcgccatgaaacaggtggtgccgccgcagttcgaggcgcgcaacgacttcgatattttccgcgagctgtgccgtcgctttaatcgcgaagaagcctttaccgaagggctggacgaaatgggctggctgaaacgcatctggcaggaaggtgtacagcaaggcaaaggacgcggcgttcatctgccagcgtttgatgacttctggaataacaaagagtacgtcgagtttgaccatccgcagatgtttgttcgccaccaggcattccgcgaagatccggatctcgaaccgctgggcacgccgagtggcctgattgagatctacagcaaaactatcgccgatatgaactacgacgattgtcaggggcatccgatgtggtttgagaaaatcgaacgctcccacggtgggcctggcagccaaaagtatccgttgcatctgcaatctgtgcatccggatttccgacttcacagccagttatgtgagagcgaaacgctgcgtcagcaatatacggtagcgggtaaagagccagtattcattaacccgcaggatgccagcgcgcgcggtattcgtaacggtgatgtggtacgcgtctttaacgctcgcggtcaggtgttggcaggggcagtggtttctgaccgctatgcacccggcgtggcacgaattcacgaaggggcatggtacgatccagataaaggcggcgagcctggtgcgctgtgcaaatacggtaaccccaacgtgttgaccatcgacatcggtacaagccagctggcgcaggcgaccagtgcgcacactacgctggtggaaattgagaagtacaacggaacagtggagcaggtgacggcgtttaacggccccgtggagatggtggcgcagtgcgaatatgttcccgcgagccaggtgaaaagttgaattaacccgcgtcgcaggtgaaatcatgaccacgctgacagcacaacagattgcctgtgtttacgcctggctagcgcagttgttctcccgtgagctggacgatgaacaactgacgcaaatcgccagtgcgcagatggctgaatggtttagcttgctgaaaagcgaaccgccgctcactgcggcggtgaacgagctggaaaaccgtattgccacgctgacagtacgtgacgatgcccgtctggaactggccgcggacttttgcggcctgtttctgatgaccgacaaacaagcggcgctgccgtatgcaagcgcctacaaacaggacgagcaagagattaaacgcttgttagttgaggcagggatggaaaccagcggcaatttcaacgaaccggcagatcatctggcgatctatctcgaattgctcagccatctgcattttagcctgggagaggggaccgttcctgcgcgaagaatcgacagtttgcggcaaaaaacactgacggcgctgtggcaatggttaccagagtttgttgcgcgttgtcgtcagtatgacagctttggtttttacgcggcactaagccagttattgctggtgttagtggagtgcgaccaccaaaacagataacgtcgtttgtgcgcctgaaaagacgcgtttagcgtcgcatcaggcattatggcgcagttgccggatgcggcgtgaacgtcttatccggcccacaggaactgtaatctttgtagaccggttaagatgcgtcatcgcatccggcaaacacacatcacggatgagctacaaaccgggaaagccgctggcgcagcaggcggttttcctgcttcaggtgcgcaatatcatccattaacgtcagcgccaccgcgatccccggccagtccagagccagttcatgacgcaggcgtaccgcgcgttgcaccacaatggcggcatggtcgtcaaatacccaggttgtttcctggatctcacgcggttcaaccacccccaaaccgacaatttcattcaactcctcttcagagatgccggtatgcaggcaaaattcggtaatagtaaaagtcaccgtaacattagccattatgctttcccccaatctttacgtggatcaaaagagctctgggcgtctgccagttgctgccacagcgcggcagtgttttcatccggtttcggcggcatcacgattttcagtaccgcatacagatcgccggtctgttttttgctcaccagacctttgcctttaacgcgcaatcgttgcccggcctggctgcctggcgggatagtcagcaaaatgctttctttcagtgttggaacggtgactttagcacccagcgccgcttcccacgggctaaccggcaccacaatttccagatcctggccgacaatatcaaacagcggatgtggcgcaatatgaatcaccagccacaaatcgccatttggaccgccgttttcgcccggcgtcccctggcctttcagacggatgcgttgaccattgccgacgcccgccgggatcttcacattcagcgttttcggaatttcctgttcgatcatgccaaaggcgttataaaccggcaggttatagctgatggtacgcttatgctcagtaagcgtttcttcgaggaataccgccacttcgatttcaatatcgtggccgcgtgtggcggggcgttgacggctctggcgggcatgctgaccgaaaatactgctgaagatatcgtcaaaatcttcggcgttaaaactctgaccgtcgccatggtggaactgacggttaaattgcggatcgttgcgatgttgccacatctgatcatactcagcgcgacgttgttcatcacttaacacttcccaggcttcagcgacctctttgaagcgggcttcggcatccggttctttgctgacatcaggatggtatttgcgggcaagtcgacgataggcggtcttgattgtcttgagatcgtccgtcggtttcacgcccatgatggcgtaataatcctttaattccatagcgttatctcgcgtaaatcaacacaaattgaaggaacccctgtaaggtaactcctataagtgtagggtaatcctcaaaatttcatatgccaacacagaatatgttattgaaatcatcgcggagaggaggtcgccatcaagatgggttgctgaacatattttaaacaggtgaaaaagggtgagcgatttttgatagttgaaccaggcactttaagtttaactagggcgtcattatttattaaattttatagacgctatatatgggtagtaatatacatggaattagttgcactgcaaataattatttgaaacaggcctggaacgatataaaaaatgagtacgaaaaaaatcaaacatatagtatcacgctttttgaaaacacactggtgtgttttatgcggttatacaatgaactcagacgtaaagtaaatgaagaggatactccatgtctggaatgtgaaagtctagaaaaagaatttgaggaaatgcagaatgataatgatctaagtttatttatgagaatattgcgtactaatgatacacaaatttatagtggggttagtggaggtattacatatactatacaatatgttcgagatattgatattgttagagtgtccttgccgggcagagctagtgagtctatcacagattttaaaggttattattggtataactttatggagtatattgaaaacattaatgcgtgtgatgatgttttttctgagtattgttttgatgatgaaaatataagtgtccagccagagcggataaatacgccgggaatatctgatttggattctgacattgatttgtctggtatatcttttattcagcgtgaaactaaccaggcattaggattaaaatatgctcctgtagatggcgatggatattgtctgttaagagctatactggttttaaaacaacatgattatagttgggcgctggtcagttataagatgcaaaaggaagtttacaacgaattcattaaaatggttgataaaaaaacgatcgaggctcttgttgatacggcattctataatctcagggaagatgtaaagacgttatttggcgttgatctacaatctgacaaccaaattcaggggcagagtagtcttatgagttggagctttctgttttttaaaaaacaattcattgatagttgcttgaataacgaaaaatgtatcctgcatttacccgagtttatatttaatgataacaagaacttgcttgctttagataccgacacgagcgataggattaaagcggtgaagaattttcttgttgttcttagtgatagcatttgcagtttatttattgttaatagtaatgtggcaagtatctccttggggaatgaatcctttagtacagatgaagatcttgagtatggttatttaatgaacactggcaatcattatgacgtttacctccctcctgaactttttgctcaggcttacaagttaaacaataaggaaatgaatgcgcaactcgactatttaaatcgttatgcaatttaatggcaaaggcatatgctaaaaaccattgttattagtctcacacttttttattggtaaatattgtctctgtattggtaacgccgcagatattctgtttagccacaggtgcaattatcagcggcgtacgcgaggcaggggctaatcaggcatagtttgcgtcaaaccttgcctgtttttgaagatgtatatagaaaaacaggcgttcaacaagccattttgcgaacctgttcccggaaaaaagtcatatttctgtcacactctttagtgattgataacaaaagaggtgccaggaatgaacaaaacgctaatcgccgcagctgtggcagggatagttttactcgctagtaacgctcaggcacaaaccgtaccggaaggctatcagctacagcaagtgctcatgatgagccgccataacttacgtgcgccgctggcgaacaatggcagtgtgctggagcagagtacgccgaataaatggccagaatgggacgtccccggtgggcaactcaccaccaaaggtggcgtgctcgaagtgtatatgggccattacatgcgtgaatggctggcagagcaggggatggtgaaaagcggggaatgcccgccgccgtacaccgtttatgcctatgccaatagtctgcaacgtaccgttgcgaccgcacagttctttattaccggcgcattcccggggtgtgatattcctgtgcatcaccaggaaaaaatgggcactatggacccaacctttaacccggtgatcaccgatgattccgccgcattcagtgaacaggcggtggcggcaatggagaaagagctcagcaaactccagcttaccgacagctaccagctactggaaaaaatcgttaactataaagattcccctgcctgtaaagagaaacaacagtgtagcctggtggatggcaaaaatacctttagcgccaagtatcaacaagaaccaggtgtttccgggccgctgaaagtcggcaacagcctggtagatgcgtttactttgcaatattacgaaggttttccgatggatcaggtggcctggggagaaatcaaatctgaccagcagtggaaggtgttgagcaagcttaaaaacggctaccaggacagcctgtttaccagtccggaagtggcgcgcaatgttgcgaaaccgctggtcagttatatcgacaaagctctggtcaccgatcgcaccagcgcaccgaaaattacagtgttggttgggcacgactccaacattgcctctctgttaacggcgctggatttcaaaccgtatcagttgcatgaccagaacgaacgcacgccgattggcggcaaaatcgttttccagcgttggcatgacagcaaagccaatcgcgatttgatgaaaattgaatatgtgtatcagagtgcggaacagttacgtaatgccgatgcgttaaccctgcaggcacctgcgcagcgtgtgacgctggaattaagcggttgcccgatagacgctgatggtttctgcccgatggataagtttgatagcgtgttgaatgaagcggtgaaataacagaaaactcccccgcgagaagcgggggagtcgctggttaaacgtttttacgttcgatggtctgttcgccccaaaaaaggctatctttatcggtcttagcaaaggctttgactaacacttcatcactaccttcttcccaaatcttttccgccattttttcgtcgtacccggcgacttcgaaaatggcctcggctatttccgggctcgtattgcgcagagatgcccattcaccgacgtgatgagctttcgcttcttgagttggcatgcgtatcctcctgttgaagattagccgttaagtttaactgccagacctgcgacatattccccttgataacgagcaatagacagttcttcctggctgggctggcgactaccgtcaccgcctgcgatggtggttgcgccgtacggcgtaccgccgcgaacctgactaacgtcaaataattcctgcgctgcgtagccaatagggacaattaccatgccgtgatgcgcaagggtcgtccaggtggatgtgatggtttgttcctgaccgccgccagtaccggtggaactaaagacgctcgccagttttccgtatagtgcgccggaagcccacaggccgcccgtctggtcgaggaaggtacgcatttgaccggacatgttgccaaagcgggtaggtgtaccaaaaataatggcgtcgtaatcggccagttcttgcggggttgcaaccggtgcagtttgcgttttaccgcctgctttttcaaataattgcggcggcatggtttccggtacacgcttaacgacaacttcagcgccatccactttgcttgcaccctcagcgactgcgcgtgccatcgtttcaatatgtccgtacatggaataataaagcaccagaactttagccatttctaaccactcctcgtgttatctctattccgtagcgattcgctaccacttatttaaagataagacgtccttttcagagtgcaaatttcacaaccacttatttgatttataacaactttcacaagcacgtaattttgtcgcaaaatgacacatttttatctcatcgcgtttttttaatcataagagcggcttatggataattattggagatgatatctattctcgctaagaagctgttgcaggatattaccaaacgcgggtctgcccgcgtcagttcactaagcttagtcccacgtagcgaaaatatggcagccgccatacgccgcgttaattctatgcaatatgatgtctatacccagacggaggtcagtaatggcaaaccatcgaggcggttccggcaattttgcagaagaccgcgaaagagcaagtgaagcaggtaaaaaaggtggacagcacagcgggggtaatttcaagaatgacccgcagcgcgcatctgaagcaggtaaaaaaggtggtaagagcagtcacggcaaaagcgacaactaaccgggctaatcaatgacgaatgcatttttgtctgtagctcgtcaaaaagccatcaccgccggttacccggtggttgatactgatgacaaatgtaagcttgcctgatgcgcgatgcttatcaggcctaccagaagattgcaatatattgaatttgcactgttttgtaggccggataaggcgtttacgccgcatccggcatgaacaatgcgtacgttgtcaacaatctgcaccgccggtaaccccggcggttttctgtttatggctcctgatgaacaacttctggcggtggaacgtcaaccaactttctgcttaacaacgcattgagtaaaatcgcgccaaaggttgctgtaccaatccctcccaacgtaaaaccgcccagcgtgagagcaaaatcacccgcgcccagcactaaggttactgcgaccataatcaaattaccgttctggcttaaatcgacacggttttgtacccatatccttgcgcctgcgacggcaatcagcccgaacacaacaatacttgcaccaccaataaccgcggccggaatggtatgaatcagcgcaccaaatttcggactaaagcccaacagcatggcgatgacggcagcagcaacaaacaccagcgtgctgtagactttggtcacggccatcacaccgatattttcagcataggtggtcacgccgctaccgccgacagagccggaaagcatcgttgccagaccatcgcctacgaatgcccgccccatatacgggtccatattgcgtccggtcatcccggcgactgccttgagatgacctaagttttccgccaccagaatcaccgccacgggcgcaatcagcatcattgcctgaccattaaaagcaggagtggaaaaatgtggcagaccgaaccaggcagcatggctgacgagagtaaaatcgacggcttttcccagccctaaaacgttggtcatcacgccatacagcagacaggcgacaattaatcctacgagaatcaataaccgctggatcatgccacgggtaaacaccgccaccagcccaatacacagcaccgtcattaccgccatccagctatcaaaggcgctagcgcttacacttttcactgcgataggcgctaagttcaggccaatcgccatcaccaccgcacccgtcaccaccggcggcatcagtcgttcaatccagcgcgtaccgattttcatcaccaccaggccaatgacggtataaaccagcccacaggcgataatcccgcccagcgcaatgctgatattcgggttaatgccctgaccgttaaagcccgtcgcggcgatcaccacgccgacaaaagccgcgctggagccgagataactggggacgcgcccgccggtaataaagaaaaacagtaacgtgccgatcccgctcattaaaatggaaagattgggatccagccccatcagaatcggcattaacaccgtcgcgccaaacatcgccaccgcgtgttgaacgcccattactgccgtctgagcaaacggcaatcgttcatccggcgcgaccacgccgctctctgtagaggtgctttttaactgccagtgaggaaaaccgaacattgccatcagctgtctccttaaggaggttaacaagcagggcgcatcagcgcgtgataactgcgatcgaaccacaccagcccgtagggtgtggtgtgacgatgaatcgcttcgatggcgcaaaacagaatgtcgtgggtgccgacgctcaccacctggctgatacggcagtcaaagctaaccagagcctcttccagttgcgggcatccggtcacccccgtctgccagcgggcggcggcaaagcggtgttccatgggcgttttgccgccaaaaaggttactaagcggctcctgcccggcgctaagtgtatttacacacagcgttcgattttcattgaatgccggccagacggacgccccacgattcaggcacaccagtaatgtgggcggcgtatcggtcacactgcagacggcgctggcggtgaacccggcgcgcccggctggaccgtccgtggtgataatattgaccgccgcgcccatgcaggacatcgcatcgcgaaaagtttgttgatcgacaatgttcatagtttgctccttacaacagcccgcaggcttcttcaaaggacagacgtggcaggcgcgcataaagcttgctgctatcgccatagccgatattaatcagcagattgctcttcagcgtgctgcccgtaaaaaaggcgtcgtccacgtgttgacggtcaaagccgctcatcgggccggtatccagtcccagcgcccggcaggcgacgatcagataggccgcctgcatggaactgttgcgaaacgctgtttcttcggcaagttgtgggctggaggtaaaccaactgcgggcatcaccgtggggaaacagtagtggtaaccgttcataaaattcactgtcccaggcgacgatagcggtgacgggcgcggtcagggttttttgcagattgccgctggaaagtgccgggcgcagacgttcttttccttctgccgtgcgggtaaacacgatccgtgccggagaacagttagcacttgtcggcccccatttcatcagggcataaatctcccgtaacgtctcatcgctgacgggtgtctcccgccagccgttgtgagtgcgggcatcggtgaacagggtgctaagcgcacctgggctaacggcttcgttcatagcaattccttacagggcggcttcacggtgatgtaacaggctggcaagcccgttgagtaacagagcattaaacgtttcgggatcggtcacgttgcaggcgtgtccgccatagggcatcaccattttctggctatcgggcagggcggcatgaagttcactggaacatgctgttggcaccagcagatcatcactggcgcagatgatttgcaccgggcagcggatgcgatccgcatggtgactaaagtcagcgcgtttgagggcgttaagtcgacgcagtaaattatttttgccctgaaaatgcgccagtgccagcgcgtcttctgcctccaggcgaggtgcgcgggccgccatccagtcggcgggatagaggaacaacggctgcgcttccacccatgcctgcgcgccgccgctatacagtaatcgttcgcgaacctgaaaacagcggcgcgtatgggcgtttattcgtagccagccgttaacgctgatcagcacagttacgctcgcgggataatccagcgccagctgcattcccaccagcgcaccgagcgcatggccgaccactgcgtaatgctcaatccctgcggctaccagcgcctgatgcagttccgctgccatctgggcgatactgtaatcttctgccagcgtgtcgggattattgccggtgccgcgctggtcgtaacagactacctgatactcctgctccagcaccgccagttgcggtaaccagtaactgccgctacccccaagaccgctaatcaacaccactacgggcgcatcagcataagggggaggactgagactaagtttcatcgcggcctcacttggcgatatgcgcaattgtggcgatttccaccagcgcgtcaggttttaccagtccgcactgaatgcagaatcgcgccggtttatcacccggaaaaaactcggcgtagatttcgttaatcgcggcgtaatttttccagtcggtaataaagatgctgttgaaggtcacatccgccatcgtgccacccgccgtctcgatcaccttgcggatagtttccagaacgtggcgggtttgcgcctttgggtcatcggcaaacagcacgttattatgttgatcaaaagccagcgtaccggagacatacaccacgccatcagccagcgtgccgggaacgaagggggccagcggtgcgctgctgccagcgggaataattacggattttggcatcgttaaactccttaagcgatatgagcaaaggacgtgggagaaagcgcgtcgcagaatgtttcgacgtcgctgacccagccaaaaaaggtttcgatattgaacaacgcggctttctgcgcaaatttcggccccgcctggtgagttgcgtcttcaagcaccacgccgaaatactccagaaaaaagccgtcgcgtagcgtgctttcgacgcagacgttggtagcgatgccggtgaaaaccagatggcgtattccgcggctgcgcaaaatgctgtccagcggcgtattgaagaaaccgctgtagcgcggcttcggcagcacaatatcgccaggctgcggcaccagttcatccaccagttgataatcccaggagcctttcgccagcaatttcccctgcagctgcggctgcttacgcatggttttcagggcgttgcttttatgaaaattcggactgccgggtccgccagcctcgacatactgttcatcccagccattttgaaaccagatgatcagcatccctgccgctcgcgctgcggtcacggcggtttgaatgttggcaatgaccgggcgagtggtactgacatcaaacccggcgagatctaagtagccgcctggcgtggcataagcgttttgcatatccaccacgatcagcgcactttgctgcggatcgaaggtaatggcttccggtcgagcggttaaggtcgtcatcatgccacctcctgagtcagcgcaggtagatgggcgcggcattgcatcagtggttgaatgcgctcgccgaaggtttcgattccgctcagaaaatcgtcgaaggttaacagcacgccttcggcaccaggcacgcttgcgacttcatctaacatgcgcgcgacactggcgtaagaaccgactaacgtccccatattgatgtttaccgcgctagtgggatcggccatctgacgaacgttggtgtcagtaccggagcgggtatctttctgactttgttcggttagccagcttaacgcctcttcatccgcgcccgctttgtagtgttcccatttggcgcgagcggcatcgtcggtttcatcggcaatcaccataaacaacacataagagccaacgtcgcgtccggtttgctctgcggcctgtttcatccgcgcagcggtcggggcgaaagccgtgggtgtatttacgcctttgccgaaacagaagttgaaatcggcataccgggcggagaacgccatgccagcgtcgctttgcccggcgcagatcactttcatggggacactcggttgcggactcacgcgacaatcattcatggtgaaaaaatcgcctttaaaatcgcttttccccgtgccccacaggtcgcgcagcacctgaacatattcggtgagatagtcgtaacgacgggagaaatagtcatcgccaggccagatacccatctgctcatactcgggcttttgccagccagtcacgaggttgacgccaaaacgcccgccagagatggagtcgatggttgcggccatacgggcgacgattgccggaggtaacgttaaggtggcagcagtggcgtaaatctgaatgcggctggtcacggccgccagccccgccatcaaggtgaagctctcaaggttgtgatcccagaactcagttttgccgccaaagccacgcagtttgatcatgctcagggcgaaatcgaaatggtagtgctccgctttttgcacaatggctttattcagttcaaaggtcggcatgtactgcggcgcgtgggtgctaatgagccagccgttgttgccaataggtacgaatacgccaattttcatcatcaacctctcttcgtctcgtaaagtgaaagtcagacggggcgctgcatcctgcatatccttttcagccgcgtattggcttgtttgcaaagcggatgccagtttttaaaaagttaatgttattaatctgttaacattacgttatctaaaatatctggtaaaaagtggactaaacggtcaaaacagttgcacataaaacatgcatctgtgcgcgatgagagtgcagaaggtcgaggccgggcgggggttttgctatcctgttgccaatctacaagaggggagagcgcatgacgcaaggcgcagtgaaaacaacgggtaaacgtagccgcgcagtaagcgcgaagaaaaaagcgattcttagcgcagcactggacacttttagtcaattcggttttcacggcacaaggctggagcagatcgcagagttggcgggtgttagtaaaaccaatctgctgtattactttccgagtaaagaggcgctgtatattgccgtgctgcggcagattctcgatatctggctggcaccgttaaaagcgtttcgtgaagatttcgccccgctggcggcgatcaaagagtacatccgtctgaagctggaagtcagtcgcgattatccgcaggctagtcgcctgttctgtatggagatgctggcaggcgcgccgctgttaatggatgaactgacgggcgatttgaaggcattaattgatgagaaaagcgcgctgattgccggttgggtcaaaagcggcaaactcgcgccgattgatccgcagcatttgatttttatgatttgggcttccactcaacattacgccgatttcgcccctcaggtggaggcggtgacaggcgcgacgttgcgcgatgaggtatttttcaatcaaacggttgaaaacgtgcagcggattattattgaggggattcgaccacgttaaagatgccggaggaggttgtaacatcctccggctacctgtttaacctatagtcattaagctggcgttaccgccagcggcagcggtattcacactcaggctacgctcgatatacagccgttccagaaggatattgctttcgccacgggcaaaaccctgcacgctaacaattgtgccatcccgcgcggcaactgcttcacacaatgcgcgaagctgatcgctatcaccgtggaagatcaccgcatcaaacggttgagcggttatattttccgctttcgccagttgaatacgttcgctgactgcgcttggcaatgccttcactaactgacgatgcagcgcgtcatccggccacagtacctggctgcccaccgccagcacggcggcgagctgagtcagcgcatcctgctcatcatcggcaatacacaacacgcgctcacgcggcagcagcgtccaggtgttgcgttcacccgtcggccccggcagcaatcgttgtgttcctgcctgcgccagctcgccatattgcgtacataacgcctgcaattctggacgatttgctgcccattcccgcagtgcatttagcggctgagtcaatgcggctttcaactgcgcatcgaccggatactttgcatcctgacgcgcgagcgtcactgccagcgcactttccgggcgattcgccagcagacggtagagatagagcggaccgcctgctttcggcccggtaccggacaacccttcgccgccgaacggctgcacaccaaccactgcgcccaccatattacggttaacatacaggttaccaacatgggcgctgccagtgacctgggcgatggtttcatcaatgcgcgtatggacgccaagcgtcagaccataaccggaagcgttaatctgctcgatcagctctggtagctggttacggttgtaacgcaccacatgcagcaccggaccaaagacctctttttgcaattcggcaaagtcatccagttcgatcagcgtcggggcgacaaaggtgccgctttgccattcacgggcatcttcgctgttttcccgcaccgcctggaacaccggacggcctttgctacgcatggtctgaatatggcgctcaatattggctttcgcttcgctatcaatcactggaccgatatcggtggtcaggcgacccggattacccatccggcattcggccattgcgccgcgcagcattttcaacgtgtggtcggcaatctcatcttgcaggcacagcacgcgcagcgcgctacaacgctgacccgcactgtcgaacgcgctggccagtacatccacgacgacctgttcggtcagtgcactagaatcgacaatcatcgcgttcatgccgccggtttcagcgatgagcggaatagggcgaccctgagcgtccaggcggctggcgatattgcgctgcagtaacgtagcgacttcggtactaccggtaaacatcaccccgcgcacgcgatcatcacccgtcagttgcgcgcccacggtttcaccccgacctggcagcaattgcaccacgcctggcggtacacccgcttccagcaaaatggcgatcccttgcgcggcaatcagcggcgtttgttctgccggttttgccagcacgctgttacctgccgccagtgcggcggcgatctgcccggtgaaaatagccagcgggaagttccacggactgatacacaccacaggccctaatggacggtgggtttcgttagcgaaatcatcccgcacctgtccggcgtagtagtggagaaaatcgaccgcttcgcgcacttcggcaatggcgttactgaaggtttttccggcctcacgcaccagaataccaatcagttgctgcatctggctttccatcagcacggcagcgcggtgcaaaatcgctgcgcgttcagccggaggcgtggcaaaccagattggcgcgttattaaccgcactttccagcgcctgttctacttcacgcggcgtggcttcacgcacatagcccacaatatctttcggttccgcagggttaataacggggctcatctcacctgccgctaccggttgttccagcattggcaaggcctgccatttttgcagtgcactattgagcagggcagaggagaggctggccaggcggtgttcgttagcgagatccagccctgcgctgttgtcgcgcccgtgaccgtaaagatcgcgcggcaggggaattttcggatgcggtaatccagtttgcccttcctgttgcgccagtttttctacagcagtgaccggatcggcgaccagttcatccagtggcaaagaggtgtcggcaatacggttaacaaagctggtgttagcaccgttttccagcaggcgacgcaccagatacgccaacagcgtttcatgtgtgccaaccggagcataaatacgacacggacggttaagtttgccgtcggcaactttcccggggacctgctcatacagtggctcgcccataccatgcaggcactggaactcgtactgacccgggtagtagttctgccccgccagttgataaatcgccgccagcgtatgggcgttgtgcgtcgcgaactgcgggtagattagattcggcaccgccagcagctttttcgcacaggcgagataagaaacgtcggtatacaccttgcgggtataaaccggataaccttcaaggccgtccatctgcgcacgcttaatttcactatcccagtacgcgcctttcaccaggcgaatcatcagacggcgacggctgcgggtggcgagatcaatcaggtaatcgatcaccaacgggcagcgtttttgataagcctgaataacaaaaccgatgccgttccagcctgccagttccggctcgaaacagagtttttccagcagatcgagggagatctccaggcgatcggactcttcggcgtcaatgttgataccaatatcgtactgacgcgccagcagggtgagacttttcagacgcgggtaaagctcttccattacccggtcatactgggcgcggctataacgcggatgcagcgcgctcagtttgatactaatgcccggcccttcatagatgccacgaccgttagacgctttaccgatggcgtgaatcgcctgctgataggaaaccatatacgcctgtgcatctgcggcggtcagcgcggcttcgcccagcatatcgtaagagtaacggaaacctttctcttccagcttgcgggcattggctaacgcttccgcgatggtttcgccagtgacgaactgctcacccatcaggcgcatcgccatatccacacctttgcggatcagcggttcaccgcttttaccgataatgcggttcaggctgcgggagaggctggcttcgttatgggtggaaaccagtttgccagtaaacagcagcccccaggtggcggcattaacaaacagactcgggctacgaccaatgtgactctgccagttaccgttgctgattttgtcgcgaattaacgcgtcgcgggtggctttgtcgggaatacgcaacaacgcttccgccagacacatcagcgccacgccttcctggctactcaggctaaactcctgcaataacccctggaccatacctgcgcgaccactggcatttttttgattacgcagtttatcggccagctgatacgccagtttgtgcgcctgttcagcaactggctgcggcaggcgggcttgttccagcagcatagaaaccgcttcggtttccgggcggcgataggccgcggtgatcgcggcgcgggaaacgctctggggcaatatttgctcggcaaagtcgaggaatggctggtgtggttcctctgccggagtcggtgcttcatcgctctcattggccgcgccagaaagcagcgcaggtagctccggcagagtatcgctgttttccagttgttcgagataagaaaaaatcgcctgcttaattaaccagtgtggtgtgcgatcgatacgtgtcgcggcagacttaatacgctcacgcgtcgcgtcgtccagcttaacccccatggtggtggttcccatgccattactcctgttgttcagaaaggtgcaacttaacgttatcgtgaaatatccatgatgttgcaactttgtgcaaccatgttaaatgtgacatgcgtagcaagcttaaaaatgaatgaaatgttaataaaagaaatcgatatgacagggattaaaaaaataactcagactttttctctgcggcagttaacatttttgaaaggtgcaaccgcaaaaaatgtgagagagtgcaacctgatgaaaaatagtgtcgctgagcactaaaatttaatgtaaatggtgtgttaaatcgattgtgaataaccagcgcttccggcaggatacggtcgccctggtaaaacataaactctgttaccccgttccggtggcagatataacggcaagtttcgacattgccgataataattttttggagactttagatggctattagcacaccgatgttggtgacattttgtgtctatatctttggcatgatattgattgggtttatcgcctggcgaagtacgaaaaactttgacgactatattctgggcggtcgtagtcttgggccattcgtgacggcattaagcgcgggtgcgagcgatatgagcggctggctgttaatggggttgccgggcgctgtttttctttccgggatttccgaaagctggatcgccattggcctgacattaggcgcgtggattaactggaagctggtggccgggcggttgcgtgtgcataccgaatacaacaataacgccttaacactgccggattatttcaccgggcgctttgaagataaaagccgcattttgcgcattatctctgcgctggttattttgctgttcttcaccatttattgcgctagcggcattgtggcaggcgcgcgtctgtttgaaagtacctttggcatgagctacgaaacggctctgtgggcgggcgctgcggcgacgatcctttacacctttattggcggtttcctcgcggtgagctggactgacactgtacaggccagcctgatgatttttgccctgatcctgacgccggttatcgtcattatcagtgtcggtggctttggtgacagcctggaagtgatcaaacaaaagagcatcgaaaacgttgatatgctcaaaggtctgaactttgttgccattatcagtctgatgggttgggggctgggttacttcgggcagccgcacattctggcgcgttttatggcggcggattctcaccacagcattgtccatgcgcgtcgtattagtatgacctggatgatcctctgcctggcaggggcggtggctgtcggcttctttgggattgcttactttaacgatcatccggcgttggctggtgcggtaaatcagaacgccgagcgtgtgtttatcgaactggcgcaaattctgtttaacccgtggattgccgggattctgctgagcgcaattctggcggcggtaatgagtaccttaagttgccagctgctggtgtgctccagtgcgattaccgaagatttgtacaaagcgtttctgcgtaaacatgccagccagaaagagctggtgtgggtagggcgtgtgatggtgctggtggtggcgctggtggcgattgcgctggcggcaaacccggaaaaccgcgtgctgggcttagtgagctacgcgtgggcaggctttggcgcggcgtttggtccagtggtgctgttcagcgtgatgtggagtcgcatgacgcgtaacggtgcgctggcggggatgatcatcggtgcgctgacggttatcgtctggaaacagttcggctggctgggactgtacgaaattattccgggctttatcttcggcagtattgggattgtagtgtttagtttgctgggtaaagcgccgagtgcggcgatgcaaaaacgctttgccgaggccgatgcgcactatcatagcgctccgccgagtcggttgcaggaaagctaagggacttagcctgcggcggttttgtttggcttcagcagcgggttgcgctcccttaatgtgcctcgccatataaattgaatggtgcagggagcgcgcagggggcggccaatcgccgccgccccctgctgtcccggccttcggggaacgcttcagcgattttgacgccaccaacacccgagctgttattatgttccgggcaaaaagttagatttgataatcgcggatggacgaaattgcttgatacacccgcttatcagttttacatggaagctctgatgcattgagtctggacagttttgtcggctggatacggcgtttacgcggcatccggcaagaacacatggttctttgcaaacaatcccatctttctaccctggaataatcgtttatatcccttggcattacctctctttgtttacattccaacatcattttataaacattccgcttgtgtttttctttgccgtaatgataatcgctatcactgcgatttacttttctttgcatagattgactcagaaaaacgtttaagggtgggtggcatgtttgttccgtttctcattatgttgcgcgaaggacttgaagccgcgctgattgtcagtttgattgccagctatcttaagcgtacccagcgaggccgatggattgtgtgatgtggattggcgtgttgcttgccgctgcgttgtgcctgggcttgggtatcttcattaacgaaaccaccggcgaatttccgcaaaaagaacaggaactgtttgaaggtatcgtggcggtgatcgccgtggtgatccttacctggatggttttctggatgcgcaaagtgtcgcgcaacgtcaaagtgcaactggaacaggcagtcgatagcgcattgcagcgtggaaatcatcatggctgggcgctggtgatgatggtcttttttgccgttgcaagggaagggctggagtcggtctttttcctgctggcggcatttcaacaagatgtcgggatctggccgccgctgggtgcaatgctcggtcttgctactgccgtggtgctaggcttcctgctctactggggcggtattcgcctcaatcttggtgcattttttaaatggaccagcctgtttattctcttcgtcgccgcagggctggcagctggtgccattcgcgcatttcatgaagccggattgtggaaccactttcaggaaatcgccttcgatatgagtgcggtgctctcaactcactcgctgtttggcacgctgatggaagggatttttggctatcaggaagcgccgagcgtcagcgaagtcgccgtctggtttatttatctcatcccggcgctggtggcatttgctctgccaccacgcgcaggggcgacagcgtctcgctccgcgtaacaaatacgacgcaaactcttgcttagttacaacatactttaaagggatagtctcgtcatgaccattaacttccgccgtaacgcattgcagttgagcgtggctgcgctgttttcttctgcttttatggctaacgccgctgatgtgccgcaggtcaaagtgaccgtgacggataagcagtgcgaaccgatgaccattacggttaacgccgggaaaacacagttcattattcagaaccacagccagaaggcgctggagtgggagatcctcaaaggcgtgatggtggtggaagagcgggaaaatatcgcccctggctttagccagaaaatgacggcgaatttacagcctggcgaatacgatatgacctgcggtctgctgactaacccgaaagggaagttgatcgtcaaaggtgaggcaacggcggatgcggcgcaaagtgatgcgctgttaagtcttggtggtgcaattactgcatataaagcgtatgtcatggcggaaaccacgcagctggtgaccgacaccaaagcctttaccgacgcgattaaagcaggcgatatcgaaaaagcgaaagcactgtatgcaccgacgcgccagcactatgagcgtattgaaccgattgctgaactgttctccgatctggatggcagcattgacgcccgtgaagatgattacgagcaaaaagccgccgacccaaaattcactggtttccaccgtctggaaaaagcattgtttggcgacaacaccaccaaagggatggaacagtacgctgagcagctttataccgatgtggtcgatttgcaaaaacgcatcagtgaactggctttcccacctagtaaagtggtcggcggcgcagccggactgattgaggaagtggcagccagcaaaattagcggtgaagaagatcgctacagccacaccgatctgtgggatttccaggctaacgttgaaggcagccagaaaattgtcgatttgctgcgtccacaactgcaaaaagccaacccggaactgctggcaaaagtcgatgccaactttaaaaaggtcgataccattctggcgaaataccgtactaaagacggttttgaaacctacgacaaattgaccgatgccgaccggaatgcactgaaaggaccgattactgcgctggcggaagatctggcgcaacttcgcggtgtgctgggactggattaagcgttatgcagtataaagatgaaaacggcgtgaatgaaccgagtcgccgacgtttactgaaagtgataggtgcactggcgctggcgggaagttgtccggtcgctcatgcacaaaaaacgcaaagtgcgccgggtacgcttagtccggatgctcgcaatgagaaacagccgttttatggtgagcatcaggcagggatcctgacgccacaacaggccgcaatgatgctggtggcgtttgatgtgcttgccagcgataaagccgatcttgagcggttgtttcgcttgttgactcagcgttttgcttttctgactcagggcggagcagcaccagaaacgccaaatccgcgcctgccaccactcgattccggcattcttggcggctacattgcgcccgataatctcaccatcacgttaagcgtgggtcacagtttgtttgatgagcgctttggccttgcgccacagatgccaaaaaagctgcagaagatgacgcgtttccccaacgacagcctggatgcggcgttatgtcatggtgatgtgttgctacagatttgcgccaacacccaggacacggttatccatgcgctgcgcgatatcatcaaacacacgccggatttgctcagtgtgcgctggaagcgggaagggtttatttccgatcacgcggcgcgtagtaaaggcaaagagacgccgattaatttgctgggtttcaaagacggcactgccaatcccgatagccagaatgataagttgatgcaaaaagtggtgtgggtaacggcagatcagcaggagcctgcgtggacaatcggtggcagctatcaggcagtacgcttgattcagtttcgagtggaattttgggacagaacgccgctgaaagaacagcagacgatttttggccgtgataagcaaaccggtgcgccgctgggaatgcagcatgagcatgatgtgcctgattacgccagcgacccggaagggaaggtgatcgcgctggacagccatatccggctggcgaatccccgcacggcggagagtgagtccagcctgatgctgcgtcgtggctacagttatagtctgggcgtcaccaactccgggcaactggatatggggttgctgtttgtctgctaccaacacgatctggaaaaaggcttcctgacagtacaaaaaaggctcaatggcgaagcgctggaggaatacgttaaacctatcggcggcggttatttttttgcgctgccgggggtgaaggacgcgaacgattatttcggaagcgcgttattgcgggtttaatgtttttaggcggataaggcatttgtgcgcagatgcctgatgcgacgcttgcgcgtcttatcatgcctacaatcagtgcgggtttggtaggctggataaggcgttcacgccgcatccggcgatcgtgcactgatgcctgatgcaaatcctgctgaaagcacacagcttttttcatcactgtcatcactctgtcatctttccagtagaaactaatgtcactgaaatggtgttttatagttaaatataagtaaatatattgttgcaataaatgcgagatctgttgtacttattaagtagcagcggaagttcccggcagtgatagtcagtcactatggagatcgcggatggtaacgtcctgtactggacatgttttagataatcaacgcgccaccactcgcggagttttctcctccggtagtcatctcgtcactttgcattttcaacctcatcctttctttagttgtgttaccgacgccgtaaacggtgcgcgtagccgttttagcgcattttatccaaaagcaaactatggcttacaaggaagccaaccctctgatgttcgtgcgcataatcgcgctgccaacggcgcgtgtgatgaatacaaacaactcaaggtgctctccatgggaagacaaaagcagtgatcaaagctcgtcgcgaggcaaaacgtgtgctgagacgggatagccgcagccataagcagcgtgaagaagaaagcgtcaccagccttgtgcagatgggcggcgtagaagccattggtatggcccgcgacagtcgcgatactagccccatcctcgcgcgaaatgaagcgcaattgcactatctgaaggctattgagagtaagcagctgatattcgccacgggcgaagccgggtgcggaaaaacctggatcagcgcagcaaaagcggcagaggccctgatacataaggatgtcgacaggattatcgtcacccgtccagttctgcaagccgatgaagatcttggcttcttacctggagatatcgcagaaaagtttgctccctattttcgcccggtctacgacgtgctggtccggcgcttaggggcttcctttatgcagtactgcctgcgaccggaaatagggaaggtggaaattgcgccgttcgcctatatgcgtggacgtacctttgaaaatgcagtcgtcattcttgacgaggcgcagaatgtgactgccgcgcaaatgaaaatgtttttaacccgcctcggggagaacgtgacggttatcgtcaacggtgatatcacgcaatgcgatttgcctcgcggcgtgtgctccggattaagtgacgcgctggaacgtttcgaagaagatgaaatggttgggatcgtccggttcggtaaagaggactgcgtacgtagcgcactttgccaacgtacgctgcatgcctacagttaagtgtgttatcggtgcagagcccgggcgaaccgggctttgttttgggtgttcccggtgtgtgcaatatacgaaaaaaaagcccgtactttcgtacgagctcttctttaaatatggcggtgagggggggattgactcgcttcgctcgccctgcgggcagcccgctcactgcgttcacggtctgtccaactggctgtcgccagttgtcgaaccccggtcggggcttctcatccccccggtgtgtgcaatatacgaaaaaaaagcccgtactttcgtacgagctcttctttaaatatggcggtgagggggggattcgaacccccgatacgttgccgtatacacactttccaggcgtgctccttcagccactcggacacctcaccaaattgtcgttcctgtcttgctggaacgggcgctaatttagggaaatcatgacctgaggtcaacaaactttttgaaaaaatcgcgcgtttattcaaacttcaatcaatgtgtggttttaataagcgaaatctgctttttttgccaccgaccacggatttgttatgctggtggcctttgtagatcataacgataagtgcgaataaatttcgcacaacgcttttcgggagtcagtatggatatcatcttttatcacccaacgttcgatacccaatggtggattgaggcactgcgcaaagctattcctcaggcaagagtcagagcatggaaaagcggagataatgactctgctgattatgctttagtctggcatcctcctgttgaaatgctggcagggcgcgatcttaaagcggtgttcgcactcggggccggtgttgattctattttgagcaagctacaggcacaccctgaaatgctgaacccttctgttccactttttcgcctggaagataccggtatgggcgagcaaatgcaggaatatgctgtcagtcaggtgctgcattggtttcgacgttttgacgattatcgcatccagcaaaatagtagccattggcaaccgctgcctgaatatcatcgggaagattttaccatcggcattttgggcgcaggcgtactgggcagtaaagttgctcagagtctgcaaacctggcgctttccgctgcgttgctggagtcgaacccgtaaaagctggcctggcgtgcaaagctttgccggacgggaagaactgtctgcatttctgagccaatgtcgggtattgattaatttgttaccgaatacccctgaaaccgtcggcattattaatcaacaattactcgaaaaattaccggatggcgcgtatctcctcaacctggcgcgtggtgttcatgttgtggaagatgacctgctcgcggcgctggatagcggcaaagttaaaggcgcaatgttggatgtttttaatcgtgaacccttaccgcctgaaagtccgctctggcaacatccacgcgtgacgataacaccacatgtcgccgcgattacccgtcccgctgaagctgtggagtacatttctcgcaccattgcccagctcgaaaaaggggagagggtctgcgggcaagtcgaccgcgcacgcggctactaataaagcatcaggattcctgctatccttggcgggaattgaatacaggagagagttatgtatcccgtcgaccttcatatgcataccgttgccagcacacatgcatatagcacattaagtgattacattgcccaggccaaacaaaagggcattaaactttttgcgatcaccgatcatggcccggatatggaagatgcgccgcatcactggcacttcattaacatgcgtatctggccgcgagtggttgatggggtagggatcctgcgcggcatcgaagctaacattaaaaatgttgatggtgaaattgactgcagcggtaaaatgtttgacagcctggatctaattattgccggttttcatgagccggtttttgcgccacatgataaagcgaccaatacacaagcgatgatcgccactatcgccagcggcaatgtgcatataataagccatcccggaaatcccaaatatgaaatagatgtgaaagccgttgctgaagcagccgcgaaacatcaggtggcgctggaaatcaataattccagttttttacacagtcgtaagggcagtgaagacaactgtcgtgaggtagccgcagcggtacgtgatgctggaggttgggtggcattaggcagcgattctcacaccgcgtttaccatgggggaatttgaagagtgtcttaaaatcctcgacgcggtagattttccgccagagcgcattttgaatgtttctccgcgccgcttactgaacttccttgaatctcgcggtatggcaccgattgcggaatttgcagacctttaattactagtaatggaaatatattaatgaacgagttttctatcctctgtcgtgtgctgggtagcctctattaccgccaaccacaagatcctttactggtgccgctgtttaccctgattcgtgaggggaaactggctgcgaactggccactggagcaggatgagttgctgacacgtttgcagaaaagctgtgatatgacgcaagtctctgccgattacaatgcgttgtttatcggcgatgaatgtgctgtgccgccatatcgtagcgcatgggttgagggcgcgacggaagcggaagtgcgcgcttttctttctgagcgagggatgccattagcggatacgccagccgatcacatcggcacattgctgctcgcagcttcctggctggaagatcagagtacggaagatgagagcgaagcactggaaacactgttcagtgagtatctgttaccctggtgtggtgcgttccttggcaaagtggaggcccatgcaaccacgcctttctggcgcaccatggcaccgctaacccgcgatgccattagtgcaatgtgggacgagctggaagaagattctgaagaataagtgtgatctacgtcactcataactgcaacggataatttgttgttgcataaaatgtgtgctcgatctcattcatggccgcgttttctgctatcatgcgcggcatgaacatacttctctctattgcaatcacaacaggcattctctccggtatctggggatgggtggctgtttccctgggcttactaagctgggcgggcttcctgggctgtacggcctactttgcctgcccgcaaggtgggctgaaagggctggcgatctccgctgcaaccctgcttagtggcgtggtgtgggcgatggtcattatttacggtagtgcactggcaccacatctggaaattctcggttatgtcataaccggtattgtcgcgtttctgatgtgtattcaggccaaacagctgctgcttagttttgttccggggacgtttataggcgcatgcgcgacgtttgccgggcagggtgactggaaactggtgttacctagcctggcgcttgggctgatatttggttacgcaatgaaaaacagtggcctgtggctggcggcgcgtagtgcaaagacggcgcaccgtgagcaggaaatcaaaaataaagcgtgaggggcactcacgctttcgcttaaacagtaaaatgccggatgataattccggcttttttatctgtcaggattccggtggaacgctcatatggcggtatttcaccagaatgtcattctgccgttctgctttattttgcaaatcccacagaccacggtcgataccatcattaatcaggaaaatgacccctgtttcgatagcgctcatcaggcacagcataacaggttcgttgctggtgtaacccacttccccttcaagcaagcgctggtagtcaataaagcggaaaaccccggcctgaacttcataggaaagtatcgtcttactggtgttcacgctagaaaggatctcgccggtactcacattgacgacgcgcaggttcacggcaatctgatcgagctggtattgcgtgtcggcaccgatgccaaaatatcttgccccaaccccgccagatttgacgttgctttcataaccgataatgctaccttcaaccatgatatttgccgccgttaaagattgcagcgggattcggttattaatggcaaccgtgccgttttcttgtgccgcacgaataatcttgcgctcgttaagcaggttttgtaagccctggcgctccagcggtataaaccagcgagaatctttcagtgccgtgaccagcattgccgtggcgctttgcggaacagcagtggagaagttacttgccgggtagggtttaaattgcccggtttcgtcctgaatgttgtatacgctaacaaagattttacccgtcggcgctggcagatgggtcaaatctttgtagctctgagcacgaggcattaatgtcggtctggcggcttctttaggcggggcggttaagcatccgctcagtaacatgacggcaaccaaaagaaataagcgctgcatgattattttccttatgaagctggggcttaaaaatcggtactgttattttgtaaaccgctaacctggatggtgctggtttgtccggttttacgatctgtcacgttcaactgcaattgaccatcgcggttggcaatatcgacaatataatcgttggtcaccatgcggcccggtttaccggtattaatattgctcagtagcccacctaaaatttgactctggatggcctgagtaaagttatctaacgcactgggtgtttcaataccaaagtcatcgttatagctcggatctttataagagttttgggcctgagcgctatttaataaaaaagcgccattatttgggttaccaccaaagtttggattacggaactggaaagtcatggttccagcccaacttaatgggctaataagcatgagtagaactactgcatgtttgacacgcattgcagcctccgaacaattttttatttagaattcatcatgcgccaaatcgcccgtacttaataacgcctgatttatctggcgacgatttagtgcttcttcagtttgaatcagtgcaaagacgacagttttctcgaagtctcttttcaacggaaataaaaaagtctggaaaataacgtcctgattgaccgttatagtgatccagcttccccatcgtgcactgggcctttcattaatcgttaagttacccgtatagtcactttcccatttatcactaaaggctcggtaaaaatcatggccaatagaactaacagtatggtcagttagcaatcccgggacttctacctcaacggcgtgaagattccctgcggcgaacagaaattctgccgccacaatccagcgtaaataacgtttcatggctttatcgcctgaggttatcgtttgcccaggaaaccgcttgtgtccggttttttacggctatcttcttgaaaagattataaagatgcgttttaaccgtattttcgctgatgaacaagctacgagcgatctcgttattagacgcgccgatacgcagcttattcaggatctctttttcccgatgagtaaggagggcactttccgtgctgttataacgatagttaccactatgcgtaatcaggtagctggcaagcttttgcgtaaagtagcattcgccgcgcaggacgccttgcaacccattgacaacacgttcttgatcctccatggaataaaaaacgccgttgatatgaggccagttttcaatgtcgcggtacgggtaatcttcaggcgtatttagcaacaatattttgatattgttgtttttcctgctcaaagtatcctgccaataatggataagctttttatccgcttccatcatatccagaagaataatagagccactagagatatcgtccagagaacgttgaatattatgtaattttcctgtaattgccaggctttgtttaaggtgctgcaagagagctgtcgcctgcaaagaagatttagtgatcaacaataatgtatgaccatgaatactatggacttcattaaacatgatgaaaccccgctttttttattgatcgcacacctgacagctgcctctaaaatagaagcaccagaagtactgacagatgttgcactgctgtgtgtagtaataaatcagccctaaatgggtaaaatataaaactaatggattacatctgatttcaatctagccattacaaatcttaaatcaagtgttaaacatgtaactaaatgtaactcgttatattaaaatgttaaccttaaggttttattaagtttagaaatgatagaaaagttgtacatttggtttttattgcacaattttaaaaaatcatacaaatggtgataacttactaataatgcatataaaaaatatttcggtgtagtcctttcgtcatgtaaaacgttcttgttttttctccacacctccgtggacaattttttactgcaaaaagacgaggtttgtcacggcttgtgcgcaagacatatcgcagcaatcagcgacgggcaagaagaatgactgtctggtgctttttgatagcggaaaacggagatttaaaagaaaacaaaatatttttttgcgtagataacagcgtatttacgtgggttttaatactttggtatgaactaaaaaagaaaaatacaacgcgcgggtgagttattaaaaatatttccgcagacatactttccatcgtaacgcagcgttaacaaaatacaggttgcgttaacaaccaagttgaaatgatttaatttcttaaatgtacgaccaggtccagggtgacaacatgaaaaacaaattgttatttatgatgttaacaatactgggtgcgcctgggattgcagccgcagcaggttatgatttagctaatagtgaatataacttcgcggtaaatgaattgagtaagtctagttttaatcaggcagccataattggtcaagctgggactaataatagtgctcagttacggcagggaggcagtaaacttttggcggttgttgcgcaagaaggtagtagcaaccgggcaaagattgaccagacaggagattataaccttgcatatattgatcaggcgggcagtgccaacgatgccagtattagccaaggtgcttatggtaatactgcgatgattatccagaaaggttctggtaataaagcaaatattacacagtatggtactcaaaaaacggcaattgtagtgcagagacagagccaaatggctattcgcgtgacacaacgttaatttccattcgacttttaaatcaatccgatgggggttttacatgaaacttttaaaagtagcagcaattgcagcaatcgtattctccggtagcgctctggcaggtgttgttcctcagtacggcggcggcggtaaccacggtggtggcggtaataatagcggcccaaattctgagctgaacatttaccagtacggtggcggtaactctgcacttgctctgcaaactgatgcccgtaactctgacttgactattacccagcatggcggcggtaatggtgcagatgttggtcagggcagtgatgacagcagtatcgatctgacccaacgtggcttcggtaacagcgctactcttgatcagtggaacggcaaaaattctgaaatgacggttaaacagttcggtggtggcaacggtgctgcagttgaccagactgcatctaactcctccgtcaacgtgactcaggttggctttggtaacaacgcgaccgctcatcagtactaatacatcatttgtattacagaaacagggcgcaagccctgttttttttcgggagaagaatatgaatacgttattactccttgcggcactttccagtcagataacctttaatacgacccagcaaggggatgtgtataccattattcctgaagtcactcttactcaatcttgtctgtgcagagtacaaatattgtccctgcgcgaaggcagtagtgggcaaagtcagacgaagcaagaaaagacccttagtttgcctgctaatcaacccattgctttgacgaagttgagtttaaatatttccccggacgatcgggtgaaaatagttgttactgtttctgatggacagagtcttcatttaagtcaacaatggccgccctctagtgaaaagtcttaatttgttgaaatatcgagcataagatgaatctggagagaatggtctgctgcgaatcagccaacctgaaagtatggataacacaaccctcaaggatgactaatcattgaggaaatagaataaatgttcagaccttttttaaactctcttatgctcggcagtttgttttttccttttattgccattgctggaagcaccgtgcaagggggcgtgatccatttttatggccaaattgtggaaccggcatgtgacgtcagcacccagagtagtcccgtagaaatgaactgcccacagaatggttctattccgggcaaaacctactccagcaaagcgttaatgagcggcaatgtcaaaaacgcgcaaatagccagtgtaaaagtgcagtatcttgataaacagaaaaagctggctgtaatgaacatcgaatataactaagtttctgaacaactcacgttgctgagcagaaaaatgcgatttaaccaaaaagcctgctgtacacttaagaaacaagaaggtgtaaggaggcgttatgaaaacgcgtattcatgttgtgcagggtgatattaccaaactggccgttgatgtgattgtgaatgcggctaatccgagtttaatgggaggcggcggcgtcgatggggccattcatcgcgcagcgggtccggccctgctggatgcttgtttaaaagtcaggcaacagcagggcgattgccctacggggcatgccgttattacgcttgcaggcgatcttcccgctaaagccgtagtgcacaccgtcgggccagtctggcgtggtggtgaacaaaacgaagaccagcttttgcaggatgcctatctcaatagcctacgactggtggcggcaaacagctatacgagtgtggcttttcctgcaatcagtactggggtttatggttaccctcgtgcggcagcggctgaaatcgcagtaaaaaccgttagtgaatttattacccgtcacgctttacccgaacaggtatactttgtctgttatgatgaagaaaacgcccacctctacgaaagactccttacccaacaaggagatgaatgatttgccccggctggcgagcgcggtgctgccactgtgtagccaacatcccggtcagtgtggcctttttcctctggagaaaagtctggatgcgtttgccgcccggtatcgtctggccgaaatggcagagcatacgctcgatgttcagtattacatctggcaggacgatatgagcggtcggttactgttttccgccctgttagccgcagcaaagcgtggcgttcgcgtccgtttgttgctggacgacaacaatacgcccggacttgacgacattttacgcttgcttgacagtcatccacgcattgaagtccggctttttaatcctttcagctttcgcttgctgcgtccgcttggttatatcaccgacttttcccgtcttaatcgccgtatgcacaataaaagtttcactgtcgatggcgtggtgaccctggtgggaggacgaaatattggtgatgcctattttggagcaggggaggagccactttttagcgatttagatgtcatggcaataggacccgtggtagaggacgttgccgatgatttcgcccgctactggtattgcaaaagcgttagtcccttacagcaggtgctggatgtcccggagggtgaaatggcggatcgcatcgagttacccgcctcctggcataacgatgccatgacgcatcgttatttacgcaaaatggaatccagtccatttataaatcatctggttgatggaacattgccgcttatctgggcgaagacacgtttattaagtgatgatccggcgaaaggggagggcaaggcaaaacggcatagtctgttaccgcagcgcctgttcgatatcatgggcagtcccagtgaacgcatcgatattatctcttcctattttgtaccgacacgcgcaggtgtggcgcaactcttacggatggtgagaaaaggggtaaagattgcgatcctaaccaattctcttgccgctaacgatgttgctgtcgtccatgccggatacgcgcgctggcgcaaaaaattgctccgctatggcgtggaattatatgaactcaagccgacgcgtgaacaaagtagtacgttacacgatcgcggcataaccggtaattccggagccagcctgcatgctaaaacctttagcatcgatggtaaaacggtgtttatcggctctttcaatttcgatccgcgtagtacattgctcaatactgaaatgggcttcgtgatagagagcgaaacgctggcacagttaattgataaacgctttattcagagccagtatgatgcggcctggcagctccgtctggacaggtggggacggatcaactgggttgatcgtcatgcaaagaaagagattattctcaaaaaagaacccgccaccagtttctggaagcgggttatggtcagactggcgagcatattgcccgtggaatggttattgtaaatgtggcttaacgggctggtgctttatcgttctcacgcttaacaaccggtttaccagagaacaaaaacttcagtaacgggatgcgcaaatgaatttcatacagaattatcgcaatccctactacaaatatcaggccacagagaaaaccaagccagttggaggtgatgtgcggtgtaatgtatgcgccgaaaaacagcgttaacgggtggtgaaccagatagataaacaggcttgcgttaacaaaataagtcacccgcgcactctggaagttaagcaaacggtggccaaaggagaagaccacattcaccatccacagaccgaggaccatggtgatcacgctctcggtttcgtacatccaggcatcgccactgccatagcgctggttgagtaaataagcgacaaacgccaatgctgctgcaagggtacagccacgagacggcgtggtaaacaaggctttaagatgagggaaaatgaaagccagtgcgccgaggataaagaacggcaaataaaacagcgtttgcatgacaataaaattgaacatgccattactcagaatgggcggatacacaataaaaatcgttcttcttattaccgcataaccgatgccgaggcataaaaaaatcacgcttagttttaccatgctgaattttttattcgttttatcagaattttctaaattatttctgatgcgcttaaatatccatacgcacagcgtcgtcatgaccactaacaccagtaaaaaccacaggtgacttattaattcccaggccaacgtattatatttgtcatacaaactcagcccaggccaactttccgcttttcctttgacatattgcagcataataaattgcggtaatgtcagtagggggatggctgttaacatcgggatacctacacgttcgacacgtactttccaccattttttcaagggatagcgtaaaaaaagcatgtaggaaaagtagccggatataacgaaaaatacctgcatgcggaagctgtggatgaagtcattaaaaagggtcagccacaaactactttcggcgctattcacatgccatgtatggctgctatagattaaagaaatatgaaaaggtatccctaacaacatcagccaggcgcggatggagtcgaggaaatattcacgttgcgcgggtactgggttcatatatggttaactaatctcggatttttcgtcttatccctgtcgggttatgcctttaggcttgttgccatagtgacaccgacctgaccgcgccaggcgcaggcttcaaggtttttatgcatagcatcatcgctaccactaaccagaatggaagcgtctgtaagacggttgataaataaatttgctggcaaaccctacacgaagtcgatgcttctgtctttaggagaagcacggaaagtgaaaacggttgcaatcaggtgcttaatccatgagccagcgtgctgaacgataccgggattctgttgtcggaatggctggttatccattaaaatagatcggatcgatataagcacacaaagggggaagtgcttactaattatgaaacataaactacaaatgatgaaaatgcgttggttgagtgctgcagtaatgttaaccctgtatacatctagtagctgggctttcagtattgatgatgtcgcaaagcaagctcaatctttagccgggaaaggctacgagacgcccaaaagcaacttgccctccgttttccgcgatatgaaatacgcggactatcagcagatccagtttaatcatgacaaagcgtactggaacaatctgaagaccccattcaaactcgagttctaccatcagggtatgtacttcgataccccggtcaaaataaatgaagtgactgccaccgcagtcaaacgaatcaaatacagcccggattatttcactttcggcgatgttcagcatgacaaagatacggtaaaagaccttggctttgccggttttaaagtgctttacccgatcaacagcaaagataaaaacgatgaaatcgtcagcatgctcggggccagctatttccgcgtgattggtgcaggtcaggtttatggcctttctgcccgcggcctggcaattgataccgccttgccaagcggtgaagaatttccgcgcttcaaagagttctggatcgagcgtccaaaaccgactgataaacgtttaaccatctatgcattgcttgacagcccgcgtgcgacaggtgcttacaaattcgtggttatgccagggcgtgacacggttgtggatgtgcagagcaaaatctatctgcgcgataaagtcggcaaactgggggttgcaccgttaaccagtatgttcctgtttgggccgaaccaaccgagccctgcaaataactatcgtccggagttgcacgactctaacggtctctctatccatgccggtaatggcgaatggatctggcgtccgttgaataacccgaaacatttagcggtcagcagcttctccatggaaaacccgcaaggctttggtctgttgcagcgcggtcgtgatttctcccgctttgaagatctcgatgatcgttacgatctccgtccaagcgcatgggtgactccgaaaggggagtggggtaaaggcagcgttgagctggtggaaattccaaccaacgatgaaaccaacgataacatcgtcgcttactggacgccggatcagctgccggagccgggtaaagagatgaactttaaatacaccatcaccttcagccgtgatgaagacaaactgcatgcgccagataacgcatgggtgcaacaaacgcgtcgtagtacgggggatgtgaagcagagcaacctgattcgccagcctgacggtactatcgcctttgtggtcgattttaccggcgcagagatgaaaaaactgccagaggataccccggtcacagcgcaaaccagcattggtgataatggtgagatagttgaaagcacggtgcgctataacccggttaccaaaggctggcgtctggtgatgcgtgtgaaagtgaaagatgccaagaaaaccactgaaatgcgtgctgcgctggtgaatgccgatcagacgttgagtgaaacctggagctaccagttacctgccaatgaataagacaactgagtacattgccgaagactgatatccgcgccgttcatcaggcgctggatgccgaacaccgcacctgggcgcgggaggatgattccccgcaaggctcggtaaaggcgcgtctggaacaagcctggccagattcacttgctgatggacagttaattaaagacgacgaagggcgcgatcagctgaaggcgatgccagaagcaaaacgctcctcgatgtttcccgacccgtggcgtaccaacccggtaggccgtttctgggatcgcctgcgtggacgcgatgtcacgccgcgctatctggctcgtttgaccaaagaagagcaggagagcgagcaaaagtggcgtaccgtcggtaccatccgccgttacattctgttgatcctgacgctcgcgcaaactgtcgtcgcgacctggtatatgaagaccattcttccttatcagggttgggcgctgattaatcctatggatatggttggtcaggatttgtgggtttcctttatgcagcttctgccttatatgctgcaaaccggtatcctgatcctctttgcggtactgttctgttgggtgtccgccggattctggacggcgttaatgggcttcctgcaactgcttattggtcgcgataaatacagtatatctgcgtcaacagttggcgatgaaccattaaacccggagcatcgcacggcgttgatcatgcctatctgtaacgaagacgtgaaccgtgtttttgctggcctgcgtgcaacgtgggaatcagtaaaagccaccgggaatgccaaacactttgatgtctacattcttagtgacagttataacccggatatctgcgtcgcagagcaaaaagcctggatggagcttatcgctgaagtcggtggcgaaggtcagattttctatcgccgccgccgtcgccgcgtgaagcgtaaaagcggtaatatcgatgacttctgccgtcgctggggcagccagtacagctacatggtggtgctggatgctgactcggtaatgaccggtgattgtttgtgcgggctggtgcgcctgatggaagccaacccgaacgccgggatcattcagtcgtcgccgaaagcgtccggtatggatacgctgtatgcgcgctgtcagcagttcgcgacccgcgtgtatgggccactgtttacagccggtttgcacttctggcaacttggcgagtcgcactactggggacataacgcgattatccgcgtgaaaccgtttatcgagcactgcgcactggctccgctgccgggcgaaggttcctttgccggttcaatcctgtcacatgacttcgtggaagcggcgttgatgcgccgtgcaggttggggggtctggattgcttacgatctcccgggttcttatgaagaattgccgcctaacttgcttgatgagctaaaacgtgaccgccgatggtgccacggtaacctgatgaacttccgtctgttcctggtgaagggtatgcacccggttcaccgtgcggtgttcctgacgggcgtgatgtcttatctctccgctccgctgtggtttatgttcctcgcgctctctactgcattgcaggtagtgcatgcgttgaccgaaccgcaatacttcctgcaaccacggcagttgttcccagtgtggccgcagtggcgtcctgagctggcgattgcactttttgcttcgaccatggtgctgttgttcctgccgaagttattgagcattttgcttatctggtgcaaaggaacgaaagaatacggcggcttctggcgcgttacattatcgttgctgctggaagtgcttttttccgtgctgctggctccggtacgcatgctgttccatacggtcttcgttgtcagcgcgttccttggctgggaagtggtgtggaattcaccgcagcgtgatgatgactccacttcctggggtgaagcgttcaaacgccacggctcacagctgctgttagggttagtgtgggctgttgggatggcgtggctggatctgcgtttcctgttctggctggcaccgattgtcttctcgttgatcctgtcaccgtttgtttcggtgatttccagccgtgccaccgttggtctgcgcaccaaacgctggaaactgttcctgatcccggaagagtattcgccgccgcaggtgctggttgataccgatcggttccttgagatgaatcgtcaacgctcccttgatgatggctttatgcacgcagtgtttaacccgtcatttaacgctctggcaaccgcaatggcgaccgcgcgtcaccgcgccagtaaggtgctggaaatcgcccgtgaccgccacgttgaacaggcgctgaacgagacgccagagaagctgaatcgcgatcgtcgcctggtgctgctaagcgatccggtgacgatggcccgtctgcatttccgtgtctggaattccccggagagatattcttcatgggtgagttattacgaagggataaagctcaatccactggcattgcgtaaaccggatgcggcttcgcaataaaaacgtagttgcctgatgcgctacgcttatcaggcctacatcgttcctgcaatttattgattttgcaagactttgtgggtcggataaggcgttcacgccgcatccggcaaaaacaacgagccaataaaaataccggcgttatgccggtatttttttacgaaagaggtatcaaatgcgtttaattgtggtgagcatcatggtgaccttgctgagtggctgtggcagcattattagtcgcactataccggggcaggggcatggcaaccaatattatcccggtgtgcaatgggatgtgcgtgactccgcctggcgttatgtcacgatccttgatctgccattctctctggtttttgatactttactgctgccgatcgacattcatcatggcccgtatgagtgattaacgttcatcccactcatcagctgctgcgcgtccttcctcggtatccagcggtggctcaagctgaaattccccctcgtcccattcatgtaatgtattctcttcctgccactcctggcgtatctctatctcatcatagtcgccatcaaaaacactttgcgcggcttcaccgctaagcataggtaaacattcaccttcttccccttcgtcggcaaaaaactcaacttgccacatgatgtcgccgtcctgcaaaacgtatttttgggcattgaactgttgcacattcgcatcttcggcgtcgatgccggggttgtctgcaagaaattcttcgcgtgcagcgtcaatggcttcttcaagcgttgcgtacatggtcatcacgattctccctttgagttgatgaggtttcagggaaaaggatagctgattctccgcttttgcaagtatgaaaggcgaaaaatcagttgcttacctggggtattcgacgacgacgtagactgttccaactatagactgcgttgaataacactacgccagcggtgacgagaaataccgctctgaaaccgtagttcgcactaatcgctgctcccatcaatggtccggtaacgttgccaatatcacgaaagctttggttatagctgaagatacgcccggcgatctggttgctgctgttgtaaaccaacagtgtctgtacggcggggagtagtgcaccatcggcggcaccgagcaaaaaacgtaaaatcccaagttgcaatggcgtctgaacgtaagacattgggatcaacagcagtacagaaaagatcagcgctgtaatcaggatcttttcgggtccgattcgatcgccaagtttgccgagtcgtggtgcacttagcagagccgccacgcctggcacgctggcgatcatgccactgataaaggcgacgttactgacgttacccgccagttcgcggacatacagcgtcagaatgggggcaatactgcccgtcgccacctggatgattaacgtagtgacaaacaggctgagtaccagtttcgggtttttaagacttgtcaccacttcccgcatgtgcagcatctcttttttgctgaccggctggaatttttctctgatgcaaaacagggtgacgaaaaagcagagtatgagcacactggcggtaataaagaataccggacgtaagccgtagctatcggcgagcaggccgccagccattgggccgagcaacgcaccactaacgccgcctgtggagagcgtacccagcgcccagccgcttttattacgcggtacttgtgtggcgataagagcattagcgttggggacaaatccgccaagtaacccaagaagcgcccgcaggatcaaaaactgccagatattttgtgccagccccatcaacaccatcacgatgcccatgccgagggcagagcgtaatagcatgagttttcggcctttacggtcggcgagtccaccccaaaacggactggcgatggcgctaaataaaaatgtaatgctgaagacaataccggaccacatattcagggcggagtgaccggtaacgccaagctgctcaacgtagaggggtaagaagggcattaccagactgaaggcggcaccggtaagaaaacagcctagccaggcgacgatcaggtttcgtttccagtttataggggtgtcattttcacagggactcatagcaatccgctgttggtgcgccaggcgcggtgaacataagaagaaaagataagcacactaattatgcgcccgacttccagggggcgcaatccagagagcttttatcgctaaatcagggggatttgctgtggtaatgccggatgccattctgaagcatccggcatgggagatttaatagcgactaggaacgccttccgggcgtgttttaaagcgacggtgtaaccacatatactgctctggtgccatcatgatgcatttttcgaccactttgttcatccacgcggcggtagtttcggcatcatccagtggcggagaacactctggcggcagcataatcaattgataccctttgccatctggcttacggcgtggaacgaagggcaccagacatgcgccggacatccgtgccagcatccaggttccggtcgtggtcgcagcctgctcaacggcaaacaacgggacgaaaacgctactgcgcgggccgtaatcatgatccggtgcgtaccagaccacttcgccttttttcagggctttaatcatgccttttaaatctttgcggtcgagcatgcttttattactgcgcaaacggccccaggtttgtagccagtcaatcagtggattatcgttcgggcgataaacgccaatacccggttcctgcataccaaactgccgcgcacccagctccagtgtcagaaaatggatgccaactaacaggatgccgcgtttttgcgcctgcacgtcacgaatgtgttccatgccgatcacttccgtccagcgggcgattcggcggtccggccagaaccacgccatgccggtttccatcaggcccatgccaacggattcgaaattcttcaccaccattttacggcgttcttgttcgctcatttccgggaagcacagttccaggttgcgatgcacaatttttgcgcgtcgtttcataaaacgtaacgccagttttcctaatccacaaccgaggcggtagataaccgggtagggcaattgcacgactaaccaaagtacgccaatacccaaccaggttaaccaataacgcggatgaagcagtgcggtggagaacttgggtagattcgtcatatcaatcctgtttttcaacctattcgggcaattgtatgtattgtcgcattttttcgcccgcaaccaaaatttgtggctgaagactgggcgaaattgccgcgcttgtaaataacaaataatttttaatgcgcaaatgtagcgtaaaatgtgtggatgttaattatcgataattgctatatcatgccgcggatttttactttcccatctcgcaggaaccgtacaccatgccagtgttacacaaccgcatttccaacgacgcgctaaaagccaaaatgttggctgagagcgaaccgcgaaccaccattagcttttacaagtatttccacatcgccgatcctaaggcgacccgtgacgctttatatcagctgtttaccgcgctgaatgtttttgggcgagtgtatctggcgcatgagggcattaacgcgcaaatcagcgtacctgcgagcaatgttgaaacatttcgcgcgcagctctatgccttcgacccggctttagagggtttacgcctgaatatcgcgttggatgatgacgggaaatccttctgggtactgcgcatgaaggtacgcgatcgcattgttgccgacggtattgacgatcctcactttgatgccagcaatgttggtgagtatctgcaagcggcggaagtgaacgccatgcttgacgatcccgatgcactatttatcgacatgcgtaaccactatgagtatgaagtggggcactttgaaaacgcgctcgaaattccggcagataccttccgtgagcagctgccaaaagcagtcgagatgatgcaggcacataaagataaaaaaatcgtcatgtactgcaccggcggcattcgttgtgaaaaggccagtgcctggatgaaacataacggattcaacaaagtctggcatatcgagggcggaattattgaatacgcccgtaaggcgcgcgagcagggcttgccggtgcgttttattggcaaaaattttgtttttgacgagcggatgggcgaacgtataagcgatgagattatcgcgcattgccaccagtgcggcgcgccgtgcgacagccataccaactgtaaaaatgatggctgccacctgctgtttattcagtgtccagtatgcgcggaaaaatacaaaggttgttgtagtgagatttgctgcgaagaaagcgcgttaccgccagaagaacagcgacgccgtcgggcaggacgtgaaaatggcaataagatctttaataagtctcgtggacgtctgaatacaacactgtgcattcctgatccaacagaataaatatcattgccggatgcgtgccatccggcaacatttcacgcttacttctgctgtacgccttccacactaataatcagatccacttcctgagaagctggacctaaatctgtcttgatattgaagtccttgagcttaattttgccttcggcctcgaagcctgcacgtttaccaccccatgggtcgtcgccctgaccaattaatttcgcttccagcgtgacgggtttggttacgccattcagcgtcagatcgccggtaatatccagttcgtcaccgtctttcttcacgctggtggaggtgaatgttgcctgtggatattttgcggtattgaggaaatctgcactgcgaagatgtttatcgcgttcggcgtgattagtatcgacgctggtggtgttaattgtcacattcactttatcggcagccggatttttttcgtcaaaggtaaaagtaccgtcgaaatctttaaaggtgccgtataaccagctatagccaaggtgctggatgcggaaattaacaaaggcgtgctgaccttctttgtcaattttgtaatcggcggcaaccgcactaccggcagagaacatcagggacgcgaaggttaaaccaagcaggctttttttcattttttatactccatagtcagaactgctctttcccagcatgcgcttcagagtgtcgtctttatcgatgaaatgatgcttcagggccataaatccgtgcataacggacagtactacgacgctccacgcgagccaaaaatgcagggcaccggcaaagtctgcctgtgcgccagcgtcggcaagggtcgcggggacgtcaaaccagccaaaaacgctgatcggtttaccatcggcagtactgatcagatagccgctgatgccgatggcgaaaagcaataggtacaatgcgagatgtccagctcttgcggcaagacgagtcatggggctataactcggcagcggacccggcggtggagatatgacacgccacagaacgcgaataaccagccccatcattaacaaaataccgatgcttttatgcagttcgggtgctttgtgataccagccatcgtaataactgagcgtgaccatccacagacctaaagcaaacatgccgtagacaataattgcgcttagccaatggaaggccgcagatataacaccatagcgttcaggggtatttgtgaaactcataagtgcatccaaaacgaatttgcgagagaaagaaaatggcgtgtcggagaatgaattgcaacacaaaaataacaaattgaatgatatttatttttatttcaataattttgaattaataatgaaagaatcttcataagtttagtgggttcagcatcagagatgtctggtgagtgctgtagaagcaggaataatctcattcaatttttcacgctaaatgaaagggagattaaatatttgtcagtttatgtcagtgcggaaaattaaaaataaaacacatagatcagatccataattgccaacaatccccagagaaaaagataaagcatcagatgctcgcgaatattattgatgagatagtgcaacagccgacgcattaaatactcctgtaaaaacggcctcattctggaggccgtaatgatgattattggaagcgggaaagcctgaatggcgtcaaatcaaaatcgctttttttgtcttgcgcaaaatcggcagctatttcccctaaaacactcgcaaatttaaaaccgtgcccactcaggccggtaatgagcagtgtattatcgtggccgggtagggtatcgataataaaatcttcgtcagggctattatcataggtgcaggcagcgccgtacaggcagcaaccgatacccggcaatacattgcgcaagaacgggaaggcttcactcccatcactggccacttccgcaaacggaacacgttcatccgcactatggataacctggcctccgttatgtttgccaatcttcaacgcgtcgttttctgccggaaaaccataatattgatcgccattgggcagttcaccggtaaacgccgggaatttattcttcacgctatagcggccatcggcctgataccaggcaaatactttgcgtacgggctggacaggcagctccgggagcaggtcttttacccatgttcccgcgcagacaatcgcttttttcgcctgatactcaccgtcagccgtttcaatagttacgccatcatcgtcatgacgaattgcggtgaccgggcagttgaacagttgcgcacagcccgcttccttcgccagttggatccaggttttaatcgccagttcgctgcgcaaaaaaccggaatcagtttcaaataagccgatgtagttgtccgggacgcgtatttccggccagcgggccataatcccttgcgcatcgagcttttcaacgttgagttgccattgttcggcgctgtgggcgacgttggcgagaaatgtggaatcagccgggccaaggttaatgacgccagagcgtacaaaaatgggatcttcttcgttgtggcgggagagttcatcccacagcgtttgcgcgcggaggaccagcgggacatacttttcgccttcaccataagcatggcgaattaatcgcgtatcgccgtggtggctgccgtgttgatgcggtggcatatgggcgtcggtcattagcacgtttaaaccggcgcgggttgcataatacccggcggcagcgcctacggaaccgctgccaataatgatgagatcgtatttcatttttttctctctgctctcatggtttaagcagagtaattaactgaatgcagatatacaacccagaaatggtaaaggcaccggtgaggtgccttttgggtggatggtcatgtcatgttaatgacgccgatactcgtttacctggaaatcaccggattcaattttggcgattcctgcttctaatatgctaataaattgtctggcaacatcagtggttaaccagagcgtctgaccaacttcagtcccttcctgctcggacttatttggggtctggtagtgcaaacgcaacatcagcgcatcatagctatcaacggtgctgatgtcccaccctacgagcggatgagtctgaatgacttcattatttttttccatcatggccccctaattcgtgttactagacaacgttattcgaggttcaatgcgtttttatctgaagcaacttcagtataccaataagtaagggtattcaccgaatttttaaagggggaaacagataaatttctgcttttaagatttatatgaacaataaaacagcatgtcattcatatttttttagcatattgtgcaattattttgaggaagtgtagaaattttgtactcaaaattcgtaagtaaaataaaaaagccggggcgacccggcaaaaaaaatcactgcatattattcgctgacaaaccagtcatcggcgctttcccacgtttcctggagaatttcactaatgcgctgtttatcttcttttgtcgcgccaataacgcttaaattattcgctgcggcataacgtacgcttacgtggccttcattatcaggaaacgcatactgaatacggcgggaaagttcgccagccagggcgtcaatagccccagctggcaatggagaagttttcgctatggtgacttcaattcgcataatagccccctgttgaatatactggttatttatacaggtaaaataacctaatgacaacaggaagctacgatttttattgtttaacggaccagcgtaccgtttccccggcgaggaatggcaccagcgtgtcatcagtcagtgcgatgctttcagcaacctgttgctcttcacgtaccagttcgatgaatgtgtcgttgaccggcaacccatagaactgcgggccgtttacagaacagaatgcttcaaagtgctgcaaagcattcatttcttcaaagacggtagcgtaactgcccagcgcggttggggcgttgaagcagcccgcgcagccgcaactgctctctttgcgatgacgtgcatgtggcgcagaatccgtaccgaggaatactcgattaaaaccgctggcgaccagttcacgcaatgcctgttggtgaatattacgtttgaggatgggtagacaatacaggtgcggacgcacgcctccaaccagcatatggttgcggttaaacatcagatgctgcggagtgatggtggcagccagccgttcatttccgtcacggacatagtcggcagcatctttggtggtgatgtgctcaaaaacgactttcagcgcagtcaggcgctggcgcagaggttccatcacgctttctataaagcgcgcttcacgatcaaaaatgtcgatatctgcatgtgtcacttcaccatgcaccagtagcggcataccgattttttccatgcgctcaagtaccggcatgattgcgtcaatactcgtcacgccgtggctggagttagtggttgcgtttgccgggtaaagttttgcagcggtgaacacgccttcgttaaatccgcgctccagctcattaggatccaggctatctgttaaataacaggtcatcaatggggtgaaatcgtgcccggcaggtacggcgtcaagaatacgctggcgatacgccacggcagcctcaacggtggtcacgggcggagccagattgggcattacgatagcccgtccataaatttcgctggtatatggcacgacagtttttaacatgtcgccatcgcggaggtgaaggtgccagtcgtctgggcggcggatctttaatacctgggatggtgcagtcattaatctctatgctccggctgaagggatgtttttgccggacacaaaggataagcggaaacgttttcctttgcacgaaaaataaagggcgcgaatgcgccctcgtgattaatcagtaaatggaatgacaatttcgcctggcttcacttcaatgcctttcgccagttttttcgccattgcttcgccctggctgccatcttcgcgcaggacgtaagcaggttgctggttaaagtaattgcgtaatgcctggttcaaatagggaagcaacgtttgcatcaccgtttgcattttttccggttgtaccgtcgcatcgaccacttccatctctttcaggaagatcgcacctttttctttatcaaacacgggcagcgctttcagcttcagtttcatggtcgctttctgactaccgaacagggagttcatgtccagattggcgtctccggttagggtaaccttattcggctcttcgcgaccaatttggctggtcaggtttgtcagaacaatatgggcgtcagccacgccgggtaaaccgatatctttactgaaattattatgtttcgcaaggctctggttaatttcttgttcggtgatggtgtattgggtgagttgattacagccaacgagcaggccactgacgatcaatgcagcggcaaataaaaacttgttcatggtagtcctcgacatgaaatctgcgtcaatatcctgacacaacgcagcatgtgtcaccagcgataaactcgccagcagaaaaaactgaaaacggcggcaacccgcgaatacaggctgccgcggcgggtcaggattaaatcgccatactacttaacaaattgatttgtgtctgtttcgccatattatcgcggtaatcagcaacgcggcttggccagttaattccggctaccagcgtcagattacgcagtagcgggaatagctgaatatcatcttcgctaagttcgccattcacggcgttcggtttgacgatcagtttgtccagcgcacgtaaatcatcgctgatattcttaatcagaccgtcagagtgggccagcaggtcggcaaaattacccgcgctggcctctttcttgtcgacgaaatatttgcgcgcggcgggagtagaaaactcatcaaatgcgcttttggcaaaacgcggcaacagcagtttgttggcgtagccattgaccttgcgcagccactcttcaatggcaggggaacgtttgccggtcagtaacggtttgccgtcgagtttatcgacatagtgaacgatgtccatgctttctggcatatagcggctgtcatctttttgcagaatgggaacctgtttttgaccgaccatccgggtgggtgtttctgcgtcgtcgttgagcagaacatgtaattcgacggggatatttttcaggccgaaaatcatgcgggctttgaggcagtaagggcagtgatcgtaaatgtatagcttcacgtgactcctccatttggctgtcagttcactttcagtatgaaggagtcaggggggagtatcaaatcaggcgtcgcgttcaagcaaacgacgcgcggcgcgtttctggctaaactgccaacccagcgcaaggaaagtgaagatgccaataatgcccagcatcatccacggaagctctggctggtgcgcgcttttgcccaggtcaaacagccagccgccaccgatataaccaatagcgccgccaatcgccagacccagacggctaaaccccatatagctgccgcgagctcttgcgtccgccaggctagcacttaaggtttcacgcgcaggctcggcaatgatgctcccgatataaaacagacaaatcagggtgaaaagttgttgcaggccgctgaccatgcccaccggcatcatgcttaaactcattatcaacagcccagccatcaaccggtgttccagacgaaaatgcttttcactccagcgggcgatagggtagagcaacgttaagctcagacacgcttcaatggcatacatccatttaacggcagagggcgcgcagccacgtcgttgaccataattggcagcatcagcatcacttgtacagccagcatgtagtaacccgccagcgtcagaacataggtgacaaaacgcttgtcacgcatcacgcgggtcatgccttcgcgaacgggcgtgcgtacggtggagagtttccatgctggtaacaaccacgcattgaacgccgcacatagcacaaatagaactgcccctgtggcgcagaccaggcgaaagtcgtattgcaacagccagctccccaacaatgcgccaatgaccgcaccggcactgtcctgcatcatcaacaggctgaaaaaacgaccacgctgctgtggacggattaatttcaccaccagcgcgctacgcggcggatcaaacaacgtgccaccgagtccgctgagcaggcaactaaaccacaatagccacggttcgtgggcgatacccattgtggcgaatccggcggcgcgcatcagcataccggtaacaatcatcggtttggcaccaaagcggtcggcaattgcaccgccgaaaatacccagaccttgctgaataaattggcgtagaccgagagcaataccgaccatgacggcggcccagcccatttgatcaacgaagcggatagagatcagcgggaagacaacaaagaaccccagcacgaccagcatattatcgatgagcaggaaatatttacccaggttcctcgcctggctcacgcgggacatttcccctcccgggaaataaaagatgagcactttctattctgcattgccgctaagacttttcccatcacttcggggacaatatttttttatcaaaacgtcgctttgatagagagtttttatcaaatatgtgaataatgcagaaaatggcattttggacttttcacagggtctggttgcgcaggtatagtaatacttacagcgtattaaagacgttacgggaaggagtaggtatagaatgtttggctatcgcagtaacgtgccaaaagtgcgcttaaccacagaccgactggtcgtgcgtctggtgcatgatcgtgatgcctggcgtcttgcggattattacgcagagaatcgccatttcctcaagccctgggagccagtgcgcgacgaaagccactgttatccaagtggctggcaggccaggctggggatgattaacgaatttcataaacaaggtagtgctttctactttggcttattcgacccggacgaaaaagagattattggcgttgccaatttttccaatgttgttcgtggctcttttcatgcctgctatctcggttatagcattgggcaaaaatggcagggcaaaggactcatgtttgaagccctgaccgcagccattcgttatatgcagcgcacccaacatattcatcgcattatggctaattatatgccgcacaataaacgcagcggtgatttactggcgcgactgggttttgaaaaagaaggctatgcgaaagactatctgttgattgatggacaatggcgcgatcacgtactgacggcattaactaccccagactggacgcccggccgctaaggagaatctcatgaaatatcaacttactgcccttgaagctcgcgtgattggttgcttgctggaaaagcaggtgaccacgccggagcaatacccgctcagtgtcaatggtgtagtcacggcctgtaatcagaaaacgaaccgtgaaccggtcatgaatctgagtgaatccgaagtgcaggaacagctggataatctggtcaaacgtcattatctacgcacagtgagcggttttggtaatcgggtcaccaaatatgagcaacgtttttgtaatagtgaatttggcgatctgaaactgagcgcagcggaagtggcgttaatcaccacgttgttattgcgtggtgcccagacgccaggtgaactgcgcagccgcgccgcgcgaatgtatgaattcagcgatatggcggaagtggagagcacgctggaacaactggcaaatcgcgaagatggtccttttgtggtgcgtctggcccgcgaaccgggtaaacgcgaaaaccgctacatgcatcttttcagtggtgaggttgaagatcagccggcggtgacggatatgagcaacgcggttgacggtgatttacaggcccgcgtcgaagccctggaaatcgaagtggcagaactgaaacagcgtcttgatagcttgctggcccatctgggagattaaagtgaaaaaattacgtatcggcgtagtgggattaggtggcattgcgcaaaaagcgtggttaccggtgctggcggcagcgtctgactggacgttacaaggagcctggagccctacgcgcgcgaaagccctgccaatttgtgaaagctggcgcattccttatgccgatagcttatccagccttgccgccagttgcgatgcggtttttgtgcattccagcaccgccagccactttgacgtggtcagtacgttactcaatgcgggggtacatgtctgtgtcgataaaccgctggcagaaaatctgcgcgatgctgaacggctggtggaactggcggcgcggaaaaaactgacgttgatggtcggttttaaccgtcgtttcgcaccactctacggtgagttaaaaacgcaactcgccaccgcagccagcctaagaatggataaacatcgtagcaatagcgtcgggccacacgatctttatttcacgttgctggatgattatctgcatgtggtggataccgcgctgtggttgagcggcggcaaagcctctctggatggcggtacgctactgactaacgacgctggcgaaatgctgtttgccgagcaccattttagcgctggtcctttgcagatcaccacctgtatgcatcgccgtgccggaagtcagcgtgaaaccgtgcaggccgtgactgacggtgcgctcatcgacattacggatatgcgcgaatggcgtgaggagcgcgggcagggcgtagtgcataaaccgattcctggttggcagagtacgcttgagcaacgtgggtttgtcggctgtgcgcggcacttcattgaatgtgtgcaaaaccagacagttccgcaaaccgccggcgaacaggccgtgctggcgcaacgtatcgttgacaagatctggcgcgatgcgatgagtgaataaaccctgtaacatctggcggtagcaattcaccataatccaggtagactattcgcctctttcagcgcctgccttgcaggcgttttgcccgtgggtctggattagaacaccgatgaatttattaaaaagcctggccgccgtcagcagcatgaccatgtttagccgtgtgcttggcttcgcacgagacgcaattgtcgccagaatctttggcgcagggatggcaaccgacgcctttttcgtcgcttttaaacttcctaacttgttacgccgtatctttgccgaaggggcattttcccaggcatttgtaccgattctggcggaatataaaagtaagcagggtgaagacgccacgcgggtctttgtctcttatgtttctggcctgctgacacttgcgctggcggttgtgacggtcgctggcatgctcgccgcaccgtgggtgatcatggtgaccgcgccaggcttcgctgacacagctgacaaatttgccctgaccagccagctactaaagattacctttccctatatcttgctgatctccctggcgagcctggtgggagcgattctgaatacgtggaaccgcttcagcattccggcgtttgctccaacactgcttaacatcagcatgattggtttcgcgctgtttgccgcaccgtactttaacccaccggtgctggcgctggcgtgggctgttacggtcggcggcgtcctgcagctggtgtatcagctaccgcacctgaagaagatcggcatgctggtcctgccgcgcattaacttccacgatgccggagcaatgcgcgtggtgaaacagatgggaccggcgatccttggcgtctctgtgagccagatctccttaatcatcaacaccatttttgccagctttcttgcttccggtagcgtgtcttggatgtattacgccgaccgcttaatggagtttccgtccggtgtgctgggcgtggcgcttggcaccattttgctgccgagcctgagcaaaagttttgccagtggcaatcatgatgaatacaaccgtttgatggactgggggttgcgtctttgtttcctgttggcgctgccgagtgcggttgcgttgggcattctttccggtccgttgaccgttagcctgttccagtacggtaaatttaccgcgtttgatgcgctgatgacccagcgggcgttaattgcctacagcgtgggtttgattggcctgattgtagtgaaagtgttggctcctggcttttattcccgccaggacattaaaacgccagtgaaaattgccatcgttacgctgattttaacgcaattgatgaacctggcgtttattggtccgttgaaacatgccgggctgagtctttctattggtctggcggcgtgtctgaatgctagcctgctttactggcagttgcgtaagcagaaaatctttaccccgcaacccggctggatggcgtttctgttgcgtctggtggtggcggtactggtgatgtctggcgtgcttttaggtatgttacatatcatgccggagtggagtttgggtaccatgccctggcgtttactgcgtttaatggcggtcgtgctggcggggattgccgcgtacttcgctgcactggcggtactgggcttcaaagttaaagaatttgcccgccggacggtgtaacaatgcattccggcctgcagtgttcgctttaaaacatatcatgaaactgggtatgttttgtctgcctgctctgggatcgctggggcgggcatttttttgcctattttgcattgttggttagcaaggatgccattcgatgaattttaatatgttgattcaaagatgaaataaaaaagccctgcagttaccagggcttgattactttgagctaattattactcaacaggttgcggacgcgcaggagcggcagaggcatgatgtgttgccgtatgaccacctgcggcacctttaccttcgaaggcaaaagtagggcgctgccagtcactgtgacgcggtgcctccggaacatattccggtgctggagcgcgcgtcattggcgcggtagcgtggttatgctcaacggtgacctcaggttcgaccgcagctaccgtttcaacttctgctgcgacttcagcgactactggcgcggcaggttgagcaacaacttcaggttcagcaactacaacctcagcagtttcgacaacttcttcaatatctgccgtctcttcctgcggttcaaccaccggttctgcttgttctgcaacttcctgggctacggcaacatcagactcggtaatcacctgcggctgttcagttaccgcggcagcgatcacttcaggatgcgtcgtttcaaccacttccggttgcggttcggcaacctgaacgggggcttctacgacaccggccacttcttcaacaactggcgcgctaacaaccggttcgatagcggcggcgacagggacctcagtcaccatcggctgcacatgtacttcttcctgttcgcgctgctcttcaacctgtacatcttgcggacgtacaattggatagcggatccagactttgccagaggccagttccggagacgcgcacgctacggtcaacggcattgggctctgggttggataacgctcgtcacgatagcgacgacgacgctgaccacttacgcgcaggtgacgagggctgcggcgagaacgacgcggcatgccaccgttgtcacggttatcagcattgttctcttcttgctgttctggtgcagtttgcgctacgactggcagcgggactttcaccagttctgtgcgtggagctggcgcttcctgaacaattggttcggcagcgacagtttcttcaaccaccggtgcgactaccgcttcttcggctacgctttgctcgtaacgcactttctgattgagctgacgctgtttacgacgcggctgaaccggacgtacacgttcttcctgttcggtttcctgaacagattgctcttcaacattcagcgccttcgcttcttgttgcgcctgacgtttatcatcattacggcggcggctacgttcacgacgcggcgcttgctgctcgtcggcggtacgcgctttttccgttacctcagcctgctgacggctctcacgcgtctcggcagtctgctgctgtgcctggcgacgattacgacggttttcttcgcgattatcgctgccttcagtacgttcactacgggtgtcgcggcgctcattacggtcacggcggttgttctgacgaggcttgcgacgatcctgttgacgttccggtttcgcttctgctttcggtgctggttgctcggtcggtttggtttcttcaccaccgctgaacagcgctttcagtgcgccgaagaagcggctcaacagcccaggttgtgcaggagctgctggtgttgccggtgcagctttcggtgctggagctacaacaggcgcggcaggttcagctggcgttggcgcaggcggcacatccggcatggcaaaggttgccagcgcaggttgttccggacgcttacgttcagcgaactcttcttcagacggcagcgccatcgcttcttcatgcagcttcggcagcatgtagcttaaggttggggtttcttcccctttacgcacgcgcagcacgtggtagtgcggggtttccatctgatcgtttggcacaattacacagcgcacaccgtcctgacgagtttcaatggcatttaccgcagaacgtttttcattcagcaggtaagaagcgattggcacaggaacaatggcgtgaacttcctgggtgttctctttcagcgcttcttcttcgatcagacgcagaatagagaggctcaggctttcgttgtcacgcacggtgccagtaccagaacaacgcggacaaacgtgatgactggattcacccagacttgggctcaggcgctgacgggacatttccagcaggccaaagcgagaaatatggctgatttgaatacgcgcacggtcctgacgcaccgcttcacgcagacggttttctaccgcacgctggtggcgtactggcgtcatgtcgatgaagtcgataacaatcaggccgccgaggtcacgcaggcgcagctgacgagcaatctcatcggcagcttcgaggttagtgttaaacgcggtttcttcgatatcgccgccgcgggtcgcgcgtgcggagttgatgtcgatggccgttaacgcttcggtgctgtcgataacaatggaaccaccagacggcagacgaacttcacgctggaaggcggactcgatctgactctcgatctggtagtggctgaacagcgggatctcgccggtgtacagtttgattttgctgctgaaatccgggcgacctaatgcagcgatatgctgacgtgccagttcgagcactttcgggttatcgataaggatttcgccgatgtcctgacgtaagtaatcgcggaatgcgcgaacgattacgttgctctcctgatgaatcaggaacggggccgggcggctttcagcggcttttttgatggcttcccagtgtttcagacggaagcttaaatcccattgcagcgcctcagcagatttgccgacgccagcggtgcgcacgataagccccatgccttccggcagttcaaggcttgccagtgcttcttttaattcggtacggtcgtcgccttcgatacggcgagaaatgccacccgcgcgcgggttgttcggcatcagaaccagatagctacccgccagactgataaaggtggttaatgccgcgcctttgttgccgcgctcttctttatcgatctgaacaatgacttcctgaccttcacgcaacacatctttaatgttgggacgaccatgagcactgtagttagcagggaaatattcgcgggcaatttcttttagtgggaggaaaccgtgacgttcagcgccgtaatcaacaaaagcagcttccagactcggttcaatgcgggtgattttacctttgtagatgtttgcctttttctgctcgtgccctggactttcgatatccaggtcatacagacgctgcccatctacaagggcaacgcgcaactcttcctgctgagttgcgttgattaacattcttttcatcgtaacttactcattattcttacattgacgactaagctgcgggcaaagtaacgcctttccgggtgtgaaccgatggcctcgtgtctagtcgcgtcgccaacctcacggttatcgtcagctcaaagaggcgcagagtgtgagttgcccgtttttcatgcggaaaaacagcgcaattatcaaagaaacagactgggtattactctccagaaatatttccatctaccggtaaggactgcaacccgcagcccgctaactgcctgaaagatcaatacgtcttacgccattgctgcgtggatgatcggtcgggcaaaatgggttattccgtaaaatttcttgttttaacaaggatggacacggaaacggcctcattattccactgcaagccttgttatagcaagatgacttttaccatttatcacccgcttactcacagttttttcacttcttgctggtgattggtttaataaccatcaataaagtgatcacgcagtgaagtaataaggtgcaaaagtaaatataagcatagaaaaatgagtggcgcgaatcctgttggctaattagaatcgccaaccatgaaaacagagactccatccgtaaaaattgttgctatcaccgctgacgaagcggggcaacgtatcgataactttttgcgtacccaattgaaaggcgtaccaaaaagtatgatttaccgtattttgcgtaaaggcgaagtgcgggtgaacaaaaaacgtattaagcctgaatataaactcgaagcgggtgatgaggtgcgtattccaccggttcgcgttgctgagcgggaagaagaggcggttagcccacatctgcaaaaggtggcggcgctggcggacgtcatcttatatgaagatgatcacatcctggtgctgaataaaccttccggtacggcggtacatggcggcagtggtttaagcttcggcgttattgaaggtttgcgggcgttgcgcccggaagcgcggttccttgaactggttcatcgtcttgaccgggacaccagtggtgttttgctggtagcgaaaaaacgcagcgcgttgcgttctctgcatgagcaattacgtgaaaaagggatgcaaaaagattacctggcgctggtgcgcggtcagtggcagagccatgtgaagagcgttcaagcaccgttactgaaaaatattctgcaaagcggcgaacgtatcgtgcgtgtgagtcaggaaggcaaaccgagcgaaacacgctttaaagtggaagaacgctatgcatttgccaccctggtgcgttgtagcccggtaacagggcgtactcaccagatccgtgtgcatacacaatatgcgggtcatccgattgcctttgacgatcgctacggtgaccgtgaatttgacaggcagctcactgaagcaggcacgggattaaatcgcctgttcctgcacgctgcagcgttgaagtttactcatccggggaccggtgaggtgatgcgtatcgaagctccgatggatgaaggtttgaagcgttgtttgcaaaagctgcgtaacgcgcgctaatacaagcatataaacctgataatgggcggttggcctgataaggcgtttacgccgcatcaggccgccagcaccgattgccggatgcgacgtaaccacatccggcgcaaaaaattatcccatcagcgggtttttcccttcccgacgtaacatctgacacagcgcgattagcggtaaaccaaccagcgtgttaggatcacgcccctctaaacgctcaaacagcgtaatgccaaatccttcactcttaaagctacccgcgcagtgcaggggatgctctttacgcacgtaattatcaatctccgcctcgctcaggtgacggaaatggacgtcaaaaggctccacttctgtttgcagatgcccattcgcgctattaaacaacgccagtccagtatagaaggtgacgatattgccgctggctttgcgtaattgcagacgggcattttcttccgttaacggtttaccggtgatttcgccatcaagaacacatacctggtcactaccaataattaaatgatccggataacgactcgccagagattgcgctttttcttgtgccagtcgaagcaccaactgtcgcggactttcgtcgctgcgtggggtttcgtcgacctctggtgctgcacattcaaaagagatttgcagtttttccagaagagcgcgacgccatgggctggtggaggctaaaataagtttaggcatatttttttccatcagatatagcgtattgatgatagccattttaaactatgcgcttcgttttgcaggttgatgtttgttatcagcactgaacgaaaataaagcagtaacccgcaatgtgtgcgaattattggcaaaaggcaaccacaggctgcctttttctttgactctatgacgttacaaagttaatatgcgcgccctatgcaaaaggtaaaattacccctgactctcgatccggttcgtacggctcaaaaacgccttgattaccagggtatctatacccctgatcaggttgagcgcgtcgccgaatccgtagtcagtgtggacagtgatgtggaatgctccatgagcttcgctatcgataaccaacgtctcgcagtgttaaacggcgatgcgaaggtgacggtaacgctcgagtgtcagcgttgcgggaagccgtttactcatcaggtctacacaacgtattgttttagtcctgtgcgtagtgacgaacaggctgaagcactgccggaagcgtatgaaccgattgaggttaacgaattcggtgaaatcgatctgcttgcaatggttgaagatgaaatcatcctcgccttgccggtagttccggtgcatgattctgaacactgtgaagtgtccgaagcggacatggtctttggtgaactgcctgaagaagcgcaaaagccaaacccatttgccgtattagccagcttaaagcgtaagtaattggtgctccccgttggatcggggataaaccgtaattgaggagtaaggtccatggccgtacaacagaataaaccaacccgttccaaacgtggcatgcgtcgttcccatgacgcgctgaccgcagtcaccagcctgtctgtagacaaaacttctggtgaaaaacacctgcgtcaccacatcactgccgacggttactaccgcggccgcaaggtcatcgctaagtaatcacgcatctgcgtgatgaagcttagtgaggattttccccaggcaactggggaaagaccaaaccgggcggcgacgataccttgacacgtctaaccctggcgttagatgtcatgggaggggattttggcccttccgtgacagtgcctgcagcattgcaggcactgaattctaatagccaactcactcttcttttagtcggcaattccgacgccatcacgccattacttgctaaagctgactttgaacaacgtagccgtctgcagattattcctgcgcagagtgttatcgccagtgatgcccggcctagccaagctatccgcgccagtcgtgggagtagtatgcgcgtggccctggagctggtgaaagaaggtcgagcgcaagcctgtgtcagtgccggtaataccggggcgctgatggggctggcaaaattattactcaagcccctggaggggattgagcgtccggcgctggtgacggtattaccacatcagcaaaagggcaaaacggtggtccttgacttaggggccaacgtcgattgtgacagcacaatgctggtgcaatttgccattatgggcagtgttctggctgaagaggtggtggaaattcccaatcctcgcgtggcgttgctcaatattggtgaagaagaagtaaagggtctcgacagtattcgggatgccagtgcggtgcttaaaacaatcccttctatcaattatatcggctatcttgaagccaatgagttgttaactggcaagacagatgtgctggtttgtgacggctttacaggaaatgtcacattaaagacgatggaaggtgttgtcaggatgttcctttctctgctgaaatctcagggtgaagggaaaaaacggagctggtggctactgttattaaagcgttggctacaaaagagcctgacgaggcgattcagtcacctcaaccccgaccagtataacggcgcctgtctgttaggattgcgcggcacggtgataaaaagtcatggtgcagccaatcagcgagcttttgcggtcgcgattgaacaggcagtgcaggcggtgcagcgacaagttcctcagcgaattgccgctcgcctggaatctgtatacccagctggttttgagctgctggacggtggcaaaagcggaactctgcggtaacaggacgctgccagcgaactcgcagtttgcaagtgacggtatataaccgaaaagtgactgagcgtacatgtatacgaagattattggtactggcagctatctgcccgaacaagtgcggacaaacgccgatttggaaaaaatggtggacacctctgacgagtggattgtcactcgtaccggtatccgcgaacgccacattgccgcgccaaacgaaaccgttagtaccatgggctttgaagcggcgacacgcgcaattgagatggcgggcattgagaaagaccagattggcctgatcgttgtggcaacgacttctgctacgcacgctttcccgagcgcagcttgtcagattcaaagcatgttgggcattaaaggttgcccggcatttgacgttgcagcagcctgcgcaggtttcacctatgcattaagcgtagccgatcaatacgtgaaatctggggcggtgaagtatgctctggtcgtcggttccgatgtactggcgcgcacctgcgatccaaccgatcgtgggactattattatttttggcgatggcgcgggcgctgcggtgctggctgcctctgaagagccgggaatcatttccacccatctgcatgccgacggtagttatggtgaattgctgacgctgccaaacgccgaccgcgtgaatccagagaatagtattcatctgacgatggcgggcaacgaagtcttcaaggttgcggtaacggaactggcgcacatcgttgatgagacgctggcggcgaataatcttgaccgttctcaactggactggctggttccgcatcaggctaacctgcgtattatcagtgcaacggcgaaaaaactcggtatgtctatggataatgtcgtggtgacgctggatcgccacggtaatacctctgcggcctctgtcccgtgcgcgctggatgaagctgtacgcgacgggcgcattaagccggggcagttggttctgcttgaagcctttggcggtggattcacctggggctccgcgctggttcgtttctaagataaggattaaaacatgacgcaatttgcatttgtgttccctggacagggttctcaaaccgttggaatgctggctgatatggcggcgagctatccaattgtcgaagaaacgtttgctgaagcttctgcggcgctgggctacgacctgtgggcgctgacccagcaggggccagctgaagaactgaataaaacctggcaaactcagcctgcgctgttgactgcatctgttgcgctgtatcgcgtatggcagcagcagggcggtaaagcaccggcaatgatggccggtcacagcctgggggaatactccgcgctggtttgcgctggtgtgattgatttcgctgatgcggtgcgtctggttgagatgcgcggcaagttcatgcaagaagccgtaccggaaggcacgggcgctatggcggcaatcatcggtctggatgatgcgtctattgcgaaagcgtgtgaagaagctgcagaaggtcaggtcgtttctccggtaaactttaactctccgggacaggtggttattgccggtcataaagaagcggttgagcgtgctggcgctgcctgtaaagcggcgggcgcaaaacgcgcgctgccgttaccagtgagcgtaccgtctcactgtgcgctgatgaaaccagcagccgacaaactggcagtagaattagcgaaaatcacctttaacgcaccaacagttcctgttgtgaataacgttgatgtgaaatgcgaaaccaatggtgatgccatccgtgacgcactggtacgtcagttgtataacccggttcagtggacgaagtctgttgagtacatggcagcgcaaggcgtagaacatctctatgaagtcggcccgggcaaagtgcttactggcctgacgaaacgcattgtcgacaccctgaccgccagcgcgctgaacgaacctagtgcgatggcagcggcgctcgagctttaaaagaggaaaatcatgaattttgaaggaaaaatcgcactggtaaccggtgcaagccgcggaattggccgcgcaattgctgaaacgctcgcagcccgtggcgcgaaagttattggcactgcgaccagtgaaaatggcgctcaggcgatcagtgattatttaggtgccaacggcaaaggtctgatgttgaatgtgaccgacccggcatctatcgaatctgttctggaaaaaattcgcgcagaatttggtgaagtggatatcctggtcaataatgccggtatcactcgtgataacctgttaatgcgaatgaaagatgaagagtggaacgatattatcgaaaccaaccttagttctgttttccgtctgagtaaagcggtaatgcgcgctatgatgaaaaagcgtcatggtcgtattatcactatcggttctgtggttggtaccatgggaaatggcggtcaggccaactacgctgcggcgaaagcgggcttgatcggcttcagtaaaagtctggcgcgcgaagttgcgagtcgcggtattactgtaaacgttgttgctccgggctttattgaaacggacatgacacgtgcgctgagcgatgaccagcgtgcgggtatcctggcgcaggttcctgcgggtcgcctcggcggcgcacaggaaatcgccaacgcggttgcattcctggcatccgacgaagcagcttacatcacgggtgaaactttgcatgtgaacggcgggatgtacatggtctgaccgcgatttgcacaaaatgctcatgttgcgcgcagtctgcgtggttatgagtaataattagtgcaaaatgatttgcgttattggggggtaaggcctcaaaataacgtaaaatcgtggtaagacctgccgggatttagttgcaaatttttcaacattttatacactacgaaaaccatcgcgaaagcgagttttgataggaaatttaagagtatgagcactatcgaagaacgcgttaagaaaattatcggcgaacagctgggcgttaagcaggaagaagttaccaacaatgcttctttcgttgaagacctgggcgcggattctcttgacaccgttgagctggtaatggctctggaagaagagtttgatactgagattccggacgaagaagctgagaaaatcaccaccgttcaggctgccattgattacatcaacggccaccaggcgtaagtgaacatctccaggcggtcgttcgaccgcctgagttttatctttttgtcccactagaatcattttttccctccctggaggacaaacgtgtctaagcgtcgtgtagttgtgaccggactgggcatgttgtctcctgtcggcaataccgtagagtctacctggaaagctctgcttgccggtcagagtggcatcagcctaatcgaccatttcgatactagcgcctatgcaacgaaatttgctggcttagtaaaggattttaactgtgaggacattatcagccgcaaagaacagcgcaagatggatgccttcattcaatatggaattgtcgctggcgttcaggccatgcaggattctggccttgaaataacggaagagaacgcaacccgcattggtgccgcaattggctccgggattggcggcctcggactgatcgaagaaaaccacacatctctgatgaacggtggtccacgtaagatcagtccattcttcgttccgagtacgattgtgaacatggtggcaggtcatctgactatcatgtatggcctgcgtggcccgagcatctctatcgcgactgcctgtacttccggcgtgcacaacattggccatgctgcgcgtattatcgcgtatggcgatgctgacgtgatggttgcaggtggcgcagagaaagccagtacgccgctgggcgttggtggttttggcgcggcacgtgcattatctacccgcaatgataacccgcaagcggcgagccgcccgtgggataaagagcgtgatggtttcgtactgggcgatggtgccggtatgctggtacttgaagagtacgaacacgcgaaaaaacgcggtgcgaaaatttacgctgaactcgtcggctttggtatgagcagcgatgcttatcatatgacgagtccgccagaaaatggcgcaggcgcagctctggcgatggcaaatgctctgcgtgatgcaggcattgaagcgagtcagattggctacgttaacgcgcacggtacttctacgccggctggcgataaagctgaagcgcaggcggtgaaaaccatcttcggtgaagctgcaagccgtgtgttggtaagctccacgaaatctatgaccggtcacctgttaggtgcggcgggtgcagtagaatctatctactccatcctggcgctgcgcgatcaggctgttccgccaaccatcaacctggataacccggatgaaggttgcgatctggatttcgtaccgcacgaagcgcgtcaggttagcggaatggaatacactctgtgtaactccttcggcttcggtggcactaatggttctttgatctttaaaaagatctaagttgtcattttccacccttataaaaggtccgcttgcgggccttttttcttagcttttattccgacttgttccgtagtgaacatgctgccacactaacaattctctgataaggagccggtatgttcttaattaacggtcataagcaggaaagcctggcagtaagcgatcgggcaacgcagtttggtgatggttgttttaccaccgccagagttatcgacggtaaagtcagtttgttaagcgcgcatatccagcgactacaggatgcttgtcagcggttgatgatttcctgtgacttctggcctcagcttgaacaagagatgaaaacgctggcagcagaacagcaaaatggtgtgctgaaagtcgtgatcagtcgcggtagtggcgggcgagggtacagcacattgaacagcggaccggcaacgcggattctctccgttacggcttatcctgcacattacgaccgtttgcgtaacgaggggattacgttggcgctaagcccggtgcggctggggcgcaatcctcatcttgcaggtattaaacatctcaatcgtcttgagcaagtattgattcgctctcatcttgagcagacaaacgctgatgaggcgctggtccttgacagcgaagggtgggttacggaatgctgtgcggctaatttgttctggcggaagggcaacgtagtttatacgccgcgactggatcaggcaggtgttaacggcattatgcgacaattctgtatccgtttgctggcacaatcctcttatcagcttgtcgaagtgcaagcctctctggaagagagcttgcaggcagatgagatggttatttgtaatgcgttaatgccagtgatgcccgtatgtgcctgtggcgatgtctcctttagcagtgcaacgttatatgaatatttagccccactttgtgagcgcccgaattaatcatgaaaaaagtgttattgataatcttgttattgctggtggtactgggtatcgccgctggtgtgggcgtctggaaggttcgccatcttgccgacagcaaattgcttatcaaagaagagacgatatttaccctgaagccagggaccggacgtctggcgctcggtgaacagctttatgccgataagatcatcaatcgtccacgggtttttcaatggctgctgcgtatcgaaccggatctttctcactttaaagccgggacttaccgctttacaccgcagatgaccgtgcgcgagatgctgaaattgctggaaagcggtaaagaagcacagttccctctgcgactggtagaagggatgcgtctgagcgattacctcaagcaattgcgtgaggccccgtatatcaagcatacgctgagcgatgataagtacgccaccgtagcgcaggcacttgaactggaaaacccggagtggattgaaggttggttctggccagacacctggatgtataccgccaataccaccgatgtcgcgttactcaagcgagcgcacaagaaaatggtgaaagcggtcgatagcgcctgggaagggcgtgcggacggtctgccttataaagataaaaaccagttggtgacgatggcaagtattatcgaaaaagaaaccgccgttgccagtgaacgcgataaggttgccagtgtatttatcaaccgtttacgcattggtatgcgcctgcagaccgacccgaccgtgatttacgggatgggagagcgttataatggcaaactttctcgtgcagacctggaaacgccgacagcgtataacacctataccattaccggtctgccgccaggtgcgatagcgacgccgggggcggatagcctgaaggctgctgcgcatccggcaaaaacgccgtatctctattttgtggccgatggtaaaggtggtcacacgtttaataccaatcttgccagtcataacaagtctgtgcaggattatctgaaagtgcttaaggaaaaaaatgcgcagtaagtatatcgtcattgaggggctggaaggcgcaggcaaaactaccgcgcgtaatgtggtggttgagacgctcgagcaactgggtatccgcgacatggttttcactcgggaacctggcggtacgcaacttgccgaaaagttaagaagcctggtgctggatatcaaaagcgtaggcgatgaagtcattaccgataaagccgaagttctgatgttttatgccgcgcgcgttcaactggtagaaacggtcatcaaaccagctctggctaacggcacctgggtgattggcgatcgccacgatctctccactcaggcgtatcagggcggcggacgtggtattgaccaacatatgctggcaacactgcgtgatgctgttctcggggattttcgccccgacttaacgctctatctcgatgttaccccggaagttggcttaaaacgcgcgcgtgcgcgcggcgagctggatcgtattgagcaagaatctttcgatttctttaatcgcacccgcgcccgctatctggaactggcagcacaagataaaagcattcataccattgatgccacccagccgctggaggccgtgatggatgcaatccgcactaccgtgacccactgggtgaaggagttggacgcatgagatggtatccatggttacgacctgatttcgaaaaactggtagccagctatcaggccggaagaggtcaccatgcgctactcattcaggcgttaccgggcatgggcgatgatgctttaatctacgccctgagccgttatttactctgccaacaaccgcagggccacaaaagttgcggtcactgtcgtggatgtcagttgatgcaggctggcacgcatcccgattactacaccctggctcccgaaaaaggaaaaaatacgctgggcgttgatgcggtacgtgaggtcaccgaaaagctgaatgagcacgcacgcttaggtggtgcgaaagtcgtttgggtaaccgatgctgccttactaaccgacgccgcggctaacgcattgctgaaaacgcttgaagagccaccagcagaaacttggtttttcctggctacccgcgagcctgaacgtttactggcaacattacgtagtcgttgtcggttacattaccttgcgccgccgccggaacagtacgccgtgacctggcttagtcgcgaagtgacaatgagtcaggatgcattacttgccgcattgcgcttaagcgccggtagccctggcgcggcactggcgttgtttcagggagataactggcaggctcgtgaaacattgtgtcaggcgttggcatatagcgtgccaagcggcgactggtatagcctgctagcggcccttaatcatgaacaagctccggcgcgtttacactggctggcaacgttgctgatggatgcgctaaaacgccatcatggtgctgcgcaggtgaccaatgttgatgtgccgggcctggtcgccgaactggcaaaccatctttctcccagccgcctgcaggctatactgggggatgtttgccacattcgtgaacagttaatgtctgttacaggcatcaaccgcgagcttctcatcaccgatcttttactgcgtattgagcattacctgcaaccgggcgttgtgctaccggttcctcatctttaagagagacatcatgtttttagtcgacagtcactgccatctcgatggtctggattatgaatctttgcataaggacgtggatgacgttctggcgaaagccgccgcacgcgatgtgaaattttgtctggcagtcgccacaacattaccgggttatttacatatgcgggatctggtaggcgaacgtgacaacgtcgtattttcttgtggcgtgcatccactcaaccagaatgatccctacgatgtagaagatttacgccgtctggcggcagaagagggtgttgtagcgctgggtgaaaccgggctggattattattacacgccggaaactaaagtacgtcagcaagagtccttcatccatcatatccagattggtcgtgaactgaacaagccggttatcgtccatacccgtgacgcccgtgccgatacgctggcaattctgcgcgaagaaaaagtgacggattgcggtggcgtactacactgttttacagaggacagagaaacggcgggtaaattactggatctcggattttacatctccttttccggcattgtgaccttccgtaatgcggagcaactgcgcgatgctgcgcgttatgtccccctggatcggttactggtggaaactgacagtccttaccttgcgccggtaccgcatcgaggaaaagagaatcaacctgcgatggttcgtgacgttgcagaatacatggctgtgttgaaaggtgttgccgttgaagaactggcgcaggtaaccaccgataacttcgcccgtctgtttcacatcgacgcttcccgccttcaatccatccgttgaatgagtttttttaaagctcgtaattaatggctaaaacgagtaaagttcaccgccgaaaattgggcggtgaataaccacgtttgaaatattgtgacatatgttttgtcaaaatgtgcaacttctccaatgatctgaagttgaaacgtgatagccgtcaaacaaattggcactgaattattttactctgtgtaataaataaagggcgcttagatgccctgtacacggcgaggctctccccccttgccacgcgtgagaacgtaaaaaaagcacccatactcaggagcactctcaattatgtttaagaatgcatttgctaacctgcaaaaggtcggtaaaagcctgatgctgccggtatccgtactgcctatcgcaggtattctgctgggcgtcggttccgcgaatttcagctggctgcccgccgttgtaagccatgttatggcagaagcaggcggttccgtctttgcaaacatgccactgatttttgcgatcggtgtcgccctcggctttaccaataacgatggcgtatccgcgctggccgcagttgttgcctatggcatcatggttaaaaccatggccgtggttgcgccactggtactgcatttacctgctgaagaaatcgcctctaaacacctggcggatactggcgtactcggagggattatctccggtgcgatcgcagcgtacatgtttaaccgtttctaccgtattaagctgcctgagtatcttggcttctttgccggtaaacgctttgtgccgatcatttctggcctggctgccatctttactggcgttgtgctgtccttcatttggccgccgattggttctgcaatccagaccttctctcagtgggctgcttaccagaacccggtagttgcgtttggcatttacggtttcatcgaacgttgcctggtaccgtttggtctgcaccacatctggaacgtacctttccagatgcagattggtgaatacaccaacgcagcaggtcaggttttccacggcgacattccgcgttatatggcgggtgacccgactgcgggtaaactgtctggtggcttcctgttcaaaatgtacggtctgccagctgccgcaattgctatctggcactctgctaaaccagaaaaccgcgcgaaagtgggcggtattatgatctccgcggcgctgaccagcttcctgaccggtatcaccgagccgatcgagttctccttcatgttcgttgcgccgatcctgtacatcatccacgcgattctggcaggcctggcattcccaatctgtattcttctggggatgcgtgacggtacgagcttcagccacggtctgatcgacttcatcgttctgtctggtaacagcagcaaactgtggctgttcccgatcgtcggtatcggttatgcgattgtttactacaccatcttccgcgtgctgattaaagcactggatctgaaaacgccgggtcgtgaagacgcgactgaagatgcaaaagcgacaggtaccagcgaaatggcaccggctctggttgctgcatttggtggtaaagaaaacattactaacctcgacgcatgtattacccgtctgcgcgtcagcgttgctgatgtgtctaaagtggatcaggccggcctgaagaaactgggcgcagcgggcgtagtggttgctggttctggtgttcaggcgattttcggtactaaatccgataacctgaaaaccgagatggatgagtacatccgtaaccactaatccgtaagacgttggggagactaaggcagccagatggctgccttttttacaggtgttattcagaattgatacgtgccggtaatgctgaaattacgcggtgtgccgtagacgatagaaccttccacgttggtatcgtaggttttgtcgaacaggttattgacgttcccctgtaagctgaagtttttcgtcacctggtagcgggtgaagagatccaccagcgcgtagctaccttgctcggcgcggaaggtgccatacggcgtcacggtgtcggtatacacgcgattttgccagttaacaccaccgccgaccgtcaactctggcatgacaggcaaccgatagctggtgaacattttaaccgtggtgcgtggcagattaggattaacggcgtttccttcgttatcctctgcaatatagcgcgttgcgccaaatgtcagctgccagttgtcggtaattgcgccgttgagttcaaattccacccctttactgactgtcccatccaccgctttataggcggtttcgccgttgctgccggggataggtgtaccggtggactgagcgacattatcctgctcaatacggaagatggctaacgtggtggtcagacggctattcatccagtcgcttttcagacccagctcgtagttgttaccggtgattggagccagatatttgccactactgtcacgatcattttgcggctggaaaatagaggtatagctggcgtaggtgctccagttgtcattgatgtcaaacaccagaccagcgtaaggcgtggtgtggtttttctccatgctgtaagtcagcgtatcaacccgccagttggtataacgtgcgccgaggatcagatgcagcggatcggcaagggtgacacgagtggcagcatataagcttttcatatgtgtggtatcgtcctgcgccaggctctgtggactccagtcggtttgtgggaaattgccattaaagttgtagaaactgccaatttcatccgggaagatgttggcccaactactgaagtaacgattgttttgtttgctgtaactgccaccaaacattagattgtgctgacgaccaaacaattcataactaccgtcagcgaacaaatccagcgcatcaactttacgtttgccactgttccaaccggtgccgccgacataatcaaagccaggtccataattactgtatggcccaaccagcataccatccgctttgtttacataggcatcgacatacatcattttgctgtcaaattcgacttcagagtgggtggcattcagtgtcgcttgccaggtatcagcaaactgctgcttcagggtcataaagaccttgttgatctctttatcgttgtacgcccagtcaggtgcggtactgcgtgcgcgatcgtaactgttgctgctgccatcagtattccagcgcggtaaaccgccccaggtagggctattaacatcaatgcgctgatattcgtaaccggcactaagcgtcgtaagatcgcctaaatcagcatcgacaatgccgctgaagaaggtcttttcactgttgtagcggtccagccaactgtcgttattctggtagccgccgacaattcgcgcgcggattttaccgtcttcggtgagtgggctttgtaaatccgccacataccgttctttgttccagctaccgtattccgcgctgacatcgcctttaaattcacgactggtcgcgtgttttcgaaccatattaattgccgcagatggattacccgtcccggtcatgagtcctgtcgcgccacgcactacttctacgcgttcaaagagtgccatatcagaaagtgcgtcgcccagattccagcggctttcaaaataggtggggataccatcaaccatatagttatcgatctggaatccgcgggaataataaagagcacgatcggaatccgcctgacttttgctgatccccagcgtgttttccatcacttcgcccagcgtttgtaactgctgatcttccatccgctgctggctaacaatagtgacgctctgaggaatatcacgttgagtcatctgcattttggtacccgcagaggtagacgttacgctgtaatcattttcgccatcatctggagctgtggcactaccctcaacaatcaccgtttcttcagtggctggtgcagcaaaagcggcagaaggtaatagtgccagtgctatgcaaccggcaagtagactcggtttggtgatggcttgatattgattatccctgttaaattgtgtactaagcatttgaaatctcttggtttatgttgtcgtcaggctcatgccggaggagggtgatgagcgattatatttagtgtgcgaataattttgtttgtaaatgcaaatgagaaatatacgcattcatatttgtcatgtaaaccaaacagagaatgtcttttcagcgcattcgcaggcagaaatgggaataatggcgatatatacggcagcaaaacgattttttgcttaagaaatcgtgagttaaggttgaaagagcaggtttaactcgaccatactctatactcgcagtgtggcgcggcgtagcatggcgcaacgcatggctatttgaaaaaggaaaatgtcgtggcagaagaaactatattcagcaaaattattcgtcgtgagatcccctccgatatcgtctaccaggatgatctggtaacggcgtttcgcgatattagcccgcaagcgccaacgcatattctgatcattccgaatatcctcattccgactgtgaacgacgtcagtgctgagcatgagcaggcgctgggacgcatgatcaccgtagcggcaaaaattgctgagcaagaaggtattgccgaagatggctatcgtctgatcatgaataccaaccgccatggcggacaagaggtttaccacatccatatgcacttgttgggtggccgtccgctgggaccaatgctggcgcataaaggtctgtaacgatgagaaaaggatgctttgggctggtgtctctggtgttgttactgctggtgggctgtcgtagtcatccggaaattccggtgaatgatgagcaaagcctggtgatggagagttctttattggctgcgggcatcagtgcagaaaagcccttccttagcacgtctgatattcaacctagtgcatccagtacgctttataacgaaaggcaagaacccgttaccgttcattatcgtttttactggtatgacgccagagggctggagatgcatcctctggaaaggccacgcagcgttaccattcccgcacatagcgcggtaacgctgtacggcagcgccaattttctgggggcgcacaaagtcagactttatctatatttgtaaggggtgaatcttgatgacaaaaatgagtcgctacgccttgattaccgcgctggcgatgtttctcgccgggtgtgtggggcaacgtgaacctgcaccggtagaagaagtgaaaccagcgccggaacaaccagccgagccacaacagcctgtccccacagtgcccagcgtgccgacgatcccgcagcagccaggcccaattgagcacgaagatcaaactgcaccgcctgcgccgcatattcgccattatgactggaatggcacaatgcagccgatggtcagtaagatgcttggggctgacggggtgactgcgggtagcgtcctgctggttgatagcgttaacaaccgtactaacggtagcctgaatgccgcagaagcgaccgaaacgctgcgaaatgcgctggctaataacgggaaatttaccctggtttccgcccagcaactgagcatggcgaagcaacagttaggtttgagcccgcaggacagtttaggcacccgtagtaaagccataggcattgcccgcaatgtcggcgctcattacgtgctgtactccagcgcctctggcaacgttaacgctccgaccctacaaatgcagctgatgctggtgcagacgggcgaaattatctggagtggtaaaggtgccgttagccagcaataagtaaaattatctggtcaggtaaaggtgccgtttcgcagcaataatcccatcacgcgcgacgaattgctgagccgctttttcccgcagtatcatcccgtcacgacgtttaatagtgggcttagtggcgggagttttctcattgaacatcagggccagcgttttgttgtgcgtcagccgcacgatcctgatgcgccgcagtccgcgttcttgcgccagtatcgggctttaagtcaactacccgcatgcattgcaccgaagccgcatttatatctccgtgactggatggtagtcgactatctgcccggcgcggtaaaaacgtatttgccggataccaacgaactggcaggcttgctgtattatctacatcaacaaccacgttttggctggcgaataacgctgttgccgttactggaactgtactggcagcaaagcgatccggcgcggcggacagtgggttggctgcgaatgttaaaacgtctgcgcaaagcgcgggaaccacggcctttacgcttaagtccattgcatatggatgtccacgccggaaatttagtgcatagcgcgagtgggttaaaactcatcgactgggagtatgccggagatggtgatatcgcgctggaactggcggcggtgtgggtggaaaatactgaacagcaccggcaattggtcaatgactatgccactcgcgcgaagatttatccggcgcaattatggcgtcaggtcaggcgatggtttccctggctgctgatgctcaaagcagggtggtttgagtaccgctggcgacaaaccggcgatcaacaatttatcaggctggccgatgacacctggcggcagctattaataaaacaataaggagagcagtgtgggtccagtaatgttggatgtcgaaggttacgaactggacgcggaagagcgtgaaatactggcgcatccgctggtgggagggctgattctctttacgcgtaactatcatgatcctgcccagttacgtgaactggtgcgccagatccgcgcagctagccgcaatcgtctggtggtggcggttgatcaggaaggtggacgcgtgcagcgttttcgtgaaggttttacccgcttgccagcggcgcaaagtttcgctgcgctgagtggaatggaagagggtggcaaactggcgcaggaggcaggttggttgatggccagcgaaatgatcgctatggatattgatatcagctttgcgcctgtgctggatgtcgggcatatcagcgcggcgattggcgagcgttcttatcatgccgatccacaaaaagccctggcaattgccagccggtttattgatggtatgcatgaagccggaatgaaaacgaccgggaaacacttcccaggacacggtgcagtaacggcagacagtcacaaagaaacaccgtgcgatccacgtccacaagcggagattcgcgctaaagatatgagcgtcttcagttccttaatccgcgaaaataaactcgacgccattatgcctgcgcatgtgatctacagtgatgttgatccgcgtccggcgagcggttctccctactggctgaaaaccgttttgcgtcaggaactgggttttgacggcgtgattttctctgacgatttaagcatggaaggtgccgcgattatgggcagttatgccgaacgcgggcaggctagtctggatgcgggttgcgatatgatcctggtctgcaataatcgtaaaggggccgtcagcgtgttagataatctgagtccgatcaaggcagaacgtgttacacgtttgtatcataaaggtagttttagccgacaggaactgatggacagcgctcgctggaaagcgatcagcacccgtctgaatcagttacatgaacgctggcaggaagagaaagcaggtcactaaccctggcttatgtgaggaagcgatgattatctatttacacggttttgactctaacagtccgggtaaccacgagaaagtcttacaattgcagtttattgacccggatgtacgcttgataagctacagtacgcggcatccgaaacatgatatgcagcatctgcttaaagaagtggacaaaatgttgcaactgaacgttgacgagcgtccgctaatttgcggcgttggcttgggcggatactgggcggaacggattggttttctttgcgacatccgccaggtgatcttcaaccctaatttgttcccttatgagaacatggaaggcaagattgatcgcccggaagagtatgccgatattgccactaagtgtgtgaccaacttccgtgagaagaatcgcgatcgttgcctggtgattttgagccgtaatgatgaagcgcttaacagccagcggacatctgaagagttgcatcattattacgagattgtctgggacgaagagcagacgcacaaattcaagaatatctccccgcatttacagcgcattaaagcgttcaaaaccctcgggtaaatgccctcgtcgcatcaggtaaccttgccggtacctgatgcgctccgaattctgtgggtcggataaggcgtccacgccgcatccgacagtcgagcatcaatgcctgatgcgcttcttatcaggcctaccgaacgccctgcatacacccctcactctatatcactctcacaaattcgctcaaataataaacaataaactctgttttttgatctcacccggtaaagtcgcctatcttttcagcaacaaaacttgattaacatcaattttggtatgaccaatgcaccattcatgttattctcaatagcgaagaacattttcattgctgtaacctgttgttaattaagagctatgttaataaccattaattaacaattggttaataaatttaagggggtcacgttgactacgccattgaaaaagattgtgattgtcggcggcggtgctggtgggctggaaatggcaacacagctggggcataagctgggacgcaagaaaaaagccaaaattacgctggtcgatcgtaaccacagccacctgtggaaaccgctgctgcacgaagtggcgactggcagccttgatgaaggcgtcgatgcgttgagctatctggcccatgcgcgcaatcatggtttccagttccagctgggttccgtcattgatattgatcgtgaagcgaaaacaatcactattgcagaactgcgcgacgagaaaggtgaactgctggttccggaacgtaaaatcgcctatgacaccctggtaatggcgctgggtagcacctctaacgatttcaatacgccaggtgtcaaagagaactgcattttcctcgataacccgcaccaggcgcgtcgcttccaccaggagatgctgaatttgttcctgaaatactccgccaacctgggcgcgaatggcaaagtgaacattgcgattgtcggcggcggcgcgacgggtgtagaactctccgctgaattgcacaacgcggtcaagcaactgcacagctacggttacaaaggcctgaccaacgaagccctgaacgtaacgctggtagaagcgggagaacgtattttgcctgcgttaccgccacgtatctctgctgcggcccacaacgagctaacgaaacttggcgttcgcgtgctgacgcaaaccatggtcaccagtgctgatgaaggcggcctgcacactaaagatggcgaatatattgaggctgatctgatggtatgggcagccgggatcaaagcgccagacttcctgaaagatatcggtggtcttgaaactaaccgtatcaaccagctggtggtggaaccgacgctgcaaaccacccgcgatccagacatttacgctattggcgactgcgcgagttgcccgcgtccggaagggggctttgttccgccgcgtgctcaggctgcacaccagatggcgacttgcgcaatgaacaacattctggcgcagatgaacggtaagccgctgaaaaattatcagtataaagatcatggtagcctggtaagcctgagcaacttctccaccgtcggtagcctgatgggtaacctgacgcgcggcagtatgatgattgaaggacgaattgcgcgctttgtatatatcagcctataccgaatgcatcagattgcgctgcatggttactttaaaaccggattaatgatgctggtggggagtattaaccgcgttatccgtccgcgtttgaagttgcattaatcgacgtacactggcggatgtggcataaacgcctcatccgcccttgaggaacagcgcgatcggcagccgcgttgtatcaggcatcctttcagactcctccgaatccttaagtatttccagccattcccgcgcttttcatcttctgtctgatagctgcttttctccttcgcttgcatgattggcataactgcaaagaaggaggtgttcccgtaaataaaagtatgttggcgggtatcgggattggtgtcgcagctgcgctgggcgtagcggcagtggccagtctgaacgtgtttgaacggggcccgcaatacgctcaggttgtttctgcaaccccaatcaaggaaacggttaaaacaccgcgtcaggagtgtcgcaacgtcacagtgacccatcgtcgaccggtgcaggatgaaaatcgcattaccgggagcgtgctcggcgctgttgctggcggcgtgatagggcatcagtttggtggtggtcgcggtaaagatgtcgccactgttgtgggggcgctgggtggtggatatgccggtaaccagatccagggctctctccaggaaagcgatacttacacgactacgcaacagcgttgtaaaacggtgtatgacaagagtgaaaaaatgctcggttatgatgtgacctataagattggcgatcagcagggcaaaatccgcatggaccgcgatccgggtacgcagatcccgctagatagcaacgggcaactgattttgaataacaaagtataacaaggctgtactctgcaatttggcccctcattcgctcaggctgaggggctttttttgcgacttatttcaccagttcgggccataaacgcaaagtcgttccggcaatctgcatcagtttttccaggcttgcaccttcgcgtgcgctgatgctcatcccctgaataatacaattaaggaattctgccagatgtgtcacgtcacagtggggcgggatttccccgcgcgcttgtcgttgacataaaaactgctgcaaagtgcgctcttgcatcgcatggcgacttttcaacgtattggcgatatctccactatctggggagagggtggtgcagttgttgatcatgaagcagcctgccggggtgtctttgctggtaaagcagttggcgatggcagcaaaatagtcagccagcgcagactccacgcttttctcttcacaaaacagctgtgcttcatgcttagcggcaaaacgatcgatatagcggtcgagaacggcacgaaataacccctctttgttggtaaattccgcgtatagcgtgggcgctttggctccggtcgcttcgacgaggtccgcaagagaagtcgcttcataaccgtgttgccagaacaatttcatggccttatcaagcgcggcatccctgtcgaacacttttgggcggccacggcttttttttacacattgtgtactgtcagttgccatgatgccgttgtacctggtgactgtgaatgaaaggttattataaaaataatcacctccgttcaccagtccagatcccataaaaataattgctttctatttaactgaaatttaaagatttttaaattaattaatgattgttataaaaaatatcttgtatgtgatccagatcacatctatcatttagttatcgatcgttaagtaattgcttgcgacgtcattcatctgcataaggccactattatgaaaaacgtaaaaaccctcatcgctgcggcgattttaagctccatgagttttgccagctttgcggctgtcgaagttcagagtacgccagaaggccaacaaaaagtcggtacaatcagtgctaacgcggggacaaatctgggaagcctggaagagcagctggcgcaaaaagcggatgagatgggcgcaaaatctttccgtattacttctgtaaccggtccgaataccctccatggaacagcagtaatttataaataagcattaaccctcattaatgcctgctactgctgattttttccccgcgacatgccgtgtcgcggggatttttttatccgggctttacagcgtttgtgggctcacttgatgacggcggacatccaccggcatcccggaacggacatccatcacatgttgcatcacttcagcgtcagtttgtgctgcatctttaaaactttgcattgcgctattcagcgtaattggcagcagctgcggatcgtcatcaatcttctcactcagcggctgatgtacttcaaccagacgcgcaccgtttggttcggcagagacttttatcggagtgttgatgatattcactttggtgcctggggtgacctggctaaagagtgttttgatatcgtcatcccgcagacgaatacagccagaacttacccgcatgccaatgccgaaatcggcgttcgtaccatgaagcaaataaacgccgccataggccgccagacgaatcgcatgatggcccattgggttatccagtccagccggcactaccgcaggcaactcaattccctgtgctttataacgggcgcggatgtttgccgttggcgtccaggttgggtttgcacgtttgtcactaacggtggtcaccattgtcggtgtcagcgtgtcaccacctaactgaccaatacctattggatacacggttacgctatttttacccggcgggtagtaatagagacgcagctccgcaatgttgatcacaatgccttcgcgcggcgcatctggaagtagggtttgcaacgggatcgttaacacgctgcccgcgcgcggtacgtaaggatcaacgccggggttagcctgtaacagagcgagaaagccgacgttgtattttttggcgatggcttccagagaaccaccgtcattttccaccacatgaaatttgttttcgccaaccagacgactgcccgctggcggcagcggccaggtgttggcttttgccggtagcgccagcgccacggcagcggcgaacgtaaaaaacgttagccagcgagaaaaacgcgttttgatcatcaccaaaaatccataataaatataaggttattgtaataaacagataagcctgaattatggatggtgacagtgtcggatagtgcagggaagtgcaaagaatttgtaaatgttgcagatgggggcgcagaaacgcccccgatttaccattaagcgatcgcgttctcttccagttcacgcataaactggcgtacccattcgatacgcgttttccgctcactcaaatcctgaataaatttcaggcgcgtcggaccatcaaggcggtaatgctgcggctgtttttgcagcaaaccaatcaaccaggccggattaacgtgattcttctcggcaaattcgatcaccccgcctttctcattaccttccagcttcctgatccccagtttctgcgcttgctggcgcagacgggcaatatccagcagggtacgcgccggatctggcagcaggccgaagcgatcgataagctcgactttgatctcttccagttcgttttccgttttggcgctggcaatacgtttgtagaagctcagacgcgtgttcacgtcagggatgaaatcatctggcaataggctcggcatccgcagctcgacttctgtttgctggctggtgagatcttccaggctcggctcgcgtccggctttcagtgcatcgacggcgttttccagcaactccatatacaggctgaaaccgatggtttccatactgccgctttgttcttcgccaagcagttcacccgcgccgcgaatctccagatcgtgcgttgccagcgcaaaacctgccccgagatcttccaggctggcaattgcttcaagacgtttttgtgcatcggtagtcatcgcttttggatgcggtgtcagcaaccatgcatatgcctgatgatggctacgtccgacgcgaccgcgtaactggtgcagctgcgccagaccgaagtgatccgcgcgttcaatgataatagtgttggctgtcgggatgtcgatcccggtttcgataatggttgtacaaaccagcacgttgaaacgttgatgatggaaatcattcatcacccgttccagttcgcgctcgcgcatctgcccgtgaccgatggcgatccgcgcttctggcaccagttctgccagccgttcggcggctttctgaatgttttccacatcattgtagagataataaacctgtcctccgcgcaaaatttcacgcaggatcgcctcccggaccaccatgctgtcatactcacggacaaaggttttaactgccagacgacgggcgggcggcgtggcgataatgctcaggtcacgcattccgctcattgccatattcagcgtacgtgggatcggcgttgcagtaagcgtcagaatatccacgttcgcgcgcatcgctttaatgcgctctttatgacgcaccccgaagcggtgttcttcatcgacaatcagcaggcctaaatctttaaacttgacgtcactttgcagcagtttgtgcgtaccgatcagaatatcgattttcccttccgccacttccgcaaggatttgcgtctgctctttggcgctgcggaaacgggagatcatttcgatacgtaccggccagttggcgaaacggtcgcggaagttgtcgtaatgctgctgcgcgagaagggtggtaggcaccagcaccgccacctgcttgtggttatctactgccaggaaagctgcgcgcatcgccacttctgttttaccaaagccaacatcgccgcacaccagacgatccattgccagcggctgacacatgtcgctaagtaccgcattaatggcctgcgcctgatccggcgtggtttcaaacgggaagctgtcgcagaacaactgatactgctcacgatcgtgtttaaacgcgaagccctctttggcggcgcgttgcgcgtagatatccagcaattccgccgccacatcacgcactttttccgccgctttctgccgcgcgcgactccacgcatcgccgccaagtttatgcagcggggcgttttcttccgcgccacctgcgtaacggctaatcagatgcagactgctcaccggaacatacagtttggcgtcgttggcataggtgagcatcagatactcgccagtaatgccacccgcttccagcgtggtcattccggcataacgaccgacgccgtgctccagatggaccaccggctgaccaatatgcagttccgcaaggttacggatcagtgtatcggggttgatggtgcggcgagaatcctgacgacgacgggcaacgcgttcaccgagcagatcgctttcgcaaatcagcgccagattacgcaccgtatcgacaaaaccatgttcggcagcgccaatcatcagataacgcccacggtcgctggcttcatcaagacgcataatgcgttgcggagcaattttaattcgtgcgagcagttcacccagcgcttcacggcgaccttcactttctacgctgaacaccaccggaccgtcgaaagtctcgaggaacttacgcagcgcatccagcggcgctttttgttgtgcctgaacggccaggtctggcagtttctggaaacctaaattggcattcgcggcttttgtcggtaaatgttcagtttttagctgcacccggggccagtttttcagctcactgaagagctcgtccacccgcagccagaggctttgtggtggcaacagcgggcgcatcggatcgacgccgcgattctcaaaacgcgccagcgtgtcagcctggaaacgttcggcactggtttccagatcgccagtattcacgagcaaggtattggcagggaaataactgaacagcggcggcagtggttcgctgaagaacaatggctgccagtactcgatcccggcaggtaatgtgcctttactcacttgctggtaaatatgttctggatcgcgcttcacttcgaaggtatcgcgccactggctgcggaacagttcaattgccgctttatcggtcggaaattcgtgcgcgggcagcagattgatcgcttctacttcctccagcgtgcgctggctgtcgacgtcaaacacccgcaggctgtcgatttcatcatcaaagaaatcaagacgataaggcagctcactccccatcgggaagagatccagcaacgcgccgcgcgtggcgtattcgccgtgctccatcacctggtcaacatggcgataaccggcgctgtccagttgggttcgtaatgcatctcgactcaggcgctgaccttttttcatcaccagcgcatgaccgtggagaaaactgtgtgggcaaacgcgctgcataagcgtattcaccggaacaatcagtacgccacgctgcatcgtcggtagctggtaaagggtggaaaggcggctggagataatgtcctgatgagggctaaaactgtcgtagggaagagtttcccagtccgccagattcatcaccatttgatcggtaaactggctgatttcatcatgcaaacgcagagcattttgcatatctggtgcaatgagtaccaccggaccggcgtgacgttcggcaatttccgctaccagcgttgcacaggctgcgccggttaactcgcccagcagacgctgctcacccgctttgacgggcagcgtataacgatattgttcaggcataacggttgtcagattctcgttaggatatgcctcaacatatgggggcatatctctgataagcaatgctgttcattatccgtaatcgacatggtttagcaaattgaatcgccccggctggggcgatggcttagcgggagtaactgacggcagcgggcagactaggcggggagaacaacagatcgctgaatgcacgctgactaagttttcttaccagcaagcccgcaacagtacagatgaacaaactgacaaagggataaaccagcaggagtgtcagttcgacttgcgggctccagcgtgctgcgttcatttgcgcaagcagagttaagctgaatatttcaaccagaatgcgatgggtggtgtagatagcaatggtgttggagccaatcacattcagcaggctggtggagcgcataccgaatcgttgctcgtattgataaaacagcttcatgatcaccacaatgcttaccaggctcaacagcaggctgatagtaaacaaccaggcaccgaccgccagaacggtaagcaaagaagccatcagcagatggcggcgcaacggcacctctttaacacaggtcattattgttgcgccaaaccatgcgccaaggctgtaataaggcaaattgcggatcacactgttcattccccaccacggcgtgggaacgaaattaaccgccacactcagcagtacaaacaaggcgaatagtggcagcgccagacggctaaaaattttacataccacgaaatagacaattaacgcatacagataccacaagctggtgctggcggtgatcatcccgtgcaggaactcaccggtggaatcggcataagcggcattggaggcattgcttaaatcgcgctcaggtgccagccactggttcagcgcacttaacgccagccactgcaccacgccccaaagcgccagcacccagaagatgttccagatccgtttatcgagacaatttccccacggtacgctgtcgatatagcggcgaatcaaatagccggatataaagaaaaaaaccggcatacgaaagggggcaaggtaaagattgaaatagatccagcatttgctcaggacttcgcttaacggatgctgaaaagtggtcagatgcggataaaaggtaatgacgctgtgataaatcaccaccagacaaatacataaccctttgatctggttaatccatagctctttttgtttcatcaggacaacacgctcttttttaatttacatgcggttgatcctgcgggttatgacccgaggtgtaatgggtatctgtctgtattggatgatttttcagattaagatcaggcggcaagattgatgataaaacatggcaatttagccgattgatttacgggggcttttcagattagccctgacgatcacttacagttcagacgtttacccatcttgctttcgcttatatactcgtgtctttgctacagcaaccagacggatttcatgtaccaacctgtcgctctatttattggcctgcgttacatgcgtgggcgtgcagcggatcgcttcggtcgtttcgtctcctggctttctaccatcggcattaccctcggggtgatggcgctggtcacagtattgagtgtgatgaacggctttgagcgcgagctgcaaaacaacatccttggcctgatgccacaggcaattctctcttctgagcatggctctcttaacccgcagcaactcccagaaacggcagtcaaactggacggcgttaatcgcgtcgcacctattactaccggtgatgtggtactgcaaagcgcgcgcagcgtggcggtcggggtgatgctcggtatcgacccggcgcaaaaagatccacttacaccgtatctggtcaatgtgaaacaaactgacctcgagccggggaaatataatgtcatcctcggcgaacaacttgccagtcagctaggcgttaatcgcggtgatcaaatccgcgtgatggtaccatctgccagccagttcacgccgatggggcgtattccaagccagcgcctgttcaatgtgattggcactttcgccgccaacagtgaagtcgatggctatgaaatgctggtgaatattgaggatgccagccgtctgatgcgttatccggcaggcaatattaccggctggcgtttgtggctggatgagccgctgaaagtcgacagtttaagtcagcaaaaactgcctgaaggcagcaaatggcaggactggcgtgatcgtaaaggcgagttgttccaggccgtacgcatggaaaaaaatatgatgggtttactgctgagcctgattgtcgccgttgcggcgtttaacattattaccagtctagggctgatggtaatggagaagcagggcgaagtagcgatcctgcaaacgcaaggcttaactccgcgacaaatcatgatggtctttatggtgcaaggggccagcgccgggattatcggtgcgatcctcggagcggcgcttggcgccctgcttgccagccagttaaataatctgatgccgataatcggcgtcctgcttgatggcgcggcgctgccggtggctatcgaacctttacaggtcattgttattgcgctggtggcgatggctatcgcgctgctgtctacgctttaccctagttggcgcgctgccgccactcaacccgctgaggctttacgttatgaataagatcctgttgcaatgcgacaacctgtgcaaacgctatcaggaaggcagtgtgcaaaccgatgtgctgcacaatgtcagtttcagcgtcggcgaaggtgaaatgatggcgatcgtcggtagctctggttccggtaaaagtaccttgctgcacctgctgggcgggctggatacgccaacctccggcgatgtgatttttaatggtcagccaatgagcaaactgagcagcgcagcgaaagctgaactgcgcaaccagaagctgggctttatttatcagtttcaccacctgctgccggattttaccgccctggaaaacgtggctatgccgctgctgattggcaagaaaaagcccgctgaaatcaacagccgtgcacttgagatgttaaaagcggtggggctggatcatcgtgcgaatcaccgcccatctgaactttctggcggcgaacgccagcgtgtggcgattgcccgtgcgctggtgaataacccgcgcctggtactggcggatgaacctaccggtaacctcgatgcgcgtaacgccgacagcatcttccagttgcttggggaattgaatcgcttgcagggcaccgccttcctggtggttactcacgacctgcaactggcgaaacgtatgagccgccagttagaaatgcgtgatggtcgtctgacggcggaactgagcctgatgggggcggagtaatggcgatgcctttaagcttattaattggcctgcgttttagtcgcggacggcggcgcggcggcatggtgagcctgatctccgttatttctaccattggcattgccctcggcgtggcggtattgatcgtcggcttaagcgcgatgaacggctttgaacgcgaactgaacaaccgtattctggcggtggtgccgcatggtgaaatcgaggcggtggatcagccgtggactaactggcaggaagcactggatcacgtgcaaaaagtgccgggtattgccgctgccgcgccgtatatcaatttcaccgggctggtggaaagtggcgcgaatcttcgcgcaatccaggtgaagggcgttaacccgcaacaggaacagcgtctgagcgcattacccagctttgtccagggcgatgcgtggcgcaattttaaagcgggcgaacagcaaattatcatcggcaaaggcgtggcggatgcgctgaaagtgaagcagggggattgggtgagcattatgatccccaacagcaatcccgagcataaactgatgcagccaaaacgtgtgcgtttgcacgttgccggtattttgcagttgagtggtcaactcgatcacagttttgccatgatcccgctggcggatgcccaacaatatcttgatatgggttccagcgtgagtggtattgcccttaaaatgacggatgttttcaacgccaataagctggtacgcgatgcgggtgaagtgaccaacagctatgtttatattaaaagctggattggtacttacggctatatgtatcgcgatatccaaatgatccgcgccattatgtatctggcgatggtactggtgattggcgtggcctgtttcaacatcgtctccaccttagtgatggcggtgaaagacaagagtggcgatatcgcagtattaagaacgctgggggcgaaagatggtttaattcgcgccatctttgtctggtatggattgctggcagggctgttcggcagcctgtgtggtgtgattatcggcgtagtggttagtctgcaacttaccccgattattgagtggattgaaaagttgatcggtcatcagttcctctccagcgatatctattttattgatttcctgccaagcgaattgcactggctggacgtcttctacgtactggtcacagcattgttgctgagtcttttggcaagttggtatccggcgcggcgcgccagtaatattgaccctgcgcgagtccttagcggccagtaaaggcagtacattaaaacaaggagcggcaatgtattacgggtttgatattggtggaacaaaaattgcgcttggcgtgtttgatagcggtcggcagttgcagtgggaaaagcgggtgccgacaccgcgtgacagctatgacgcatttttagatgcagtgtgtgagctggtagctgaagctgaccaacgttttggctgtaaaggttctgtcggcatcggtattccgggaatgccggaaacagaagatggtacgctgtatgccgccaatgtccccgctgccagcggtaaaccgctgcgtgccgacctgagcgcacgtcttgatcgcgatgtacgccttgataacgatgccaactgttttgcccttagtgaagcctgggatgatgaatttactcaatatccactggtgatggggttgattctcggcaccggtgttggcggcgggctgattttcaacggcaaaccgattaccggtaaaagctacattaccggcgagtttggccatatgcgtctgccggttgatgcgttaaccatgatggggttggatttcccgttacgccgctgcggctgtggtcagcatggctgcattgaaaattatctgtctggtcgcggttttgcgtggctgtatcaacactattatcatcaaccgttgcaggctcccgaaattattgcgctttatgatcaaggcgatgagcaggcaagggcgcacgttgagcgttatctggatttattagcggtttgtctgggaaatatcctgaccatcgttgaccctgacctggtcgtcattggtggtggcttaagcaatttcccggcaatcacaacgcaactggcggacaggctgcctcgtcatctcttacctgtagctcgtgttccgcgcattgaacgcgcgcgccacggtgatgcgggaggaatgcgtggtgcggccttcctacatctaaccgattaaacaacagaggttgctatgctgagccgtcggggtcatcggttaagtcgttttcgtaaaaataaacgccgcctgcgcgagcgtttgcgtcagcgtatttttttcagagataaagtggtgccggaagcaatggaaaaaccaagagtactcgtactgacaggggcaggaatttctgcggaaagtggtattcgtacctttcgcgccgcagatggcctgtgggaagaacatcgggttgaagatgtggcaacgccggaaggtttcgatcgcgatcctgaactggtgcaagcgttttataacgcccgtcgtcgacagctgcagcagccagaaattcagcctaacgccgcgcatcttgcgctggctaaactgcaagacgccctcggcgatcgctttttgctggtgacgcagaatatcgacaacctgcatgaacgcgcaggtaataccaatgtgattcatatgcatggggaactgctgaaagtgcgttgtagtcaaagtggtcaggttctcgactggacaggagacgttaccccagaagataaatgccattgttgccagtttccggcacccttgcgcccgcacgtagtgtggtttggcgaaatgccactcggcatggatgaaatttatatggcgttgagcatggccgatattttcattgccattggcacatccgggcatgtttatccggcggctgggtttgttcacgaagcgaaactgcatggcgcgcacaccgtggaactgaatcttgaaccgagtcaggttggtaatgaatttgccgagaaatattacggcccggcaagccaggtggcgcctgagtttgttgaaaagttgctgaagggattaaaagcgggaagcattgcctgatgcactacgcttatcaggcctgcaaggggacgcaattaattgaatttgcgggttttgtgggccggataaggcgttcgcgccccatccggaataatacacgcgcacttttccggcctcttttatcgtttactcgtcaataacaatgcggcaataaacgtacagacaccaattagccctgcccagagtgggcttattctggtaatcgcaaagctattatcgatatacaaacataaagcctgataacccatattggcaatagtcatcgccactgcaaattttaacgcataaataaaacgagtcgtgtagtaaaagatcctggaaaataagataaacgtcgcagcccaggcgataaaacctaatgtgttggtgctgccggggggagcattttcatgctgttgtcctggatgcggataatacgttagtggcggcgtgctttgttttaatatctgtgcttgtagaacagccaatgcattattgattccctgataccagagatctgcatttaaataagccagcgtgtgattttctatcagaaggccgagatgtttatcgtccagaccactttcaacctggccgttggtgatcataattaaccgtggttcgcgggtagtaaatagtaacagaacacttccttttacatcactcaaactagaactcgcatgcgccagcatcgctttaccattttgtctgagactggcttcattattaatgtcgggtaaaaccacaataaacggtgcaattcccgtttgttggcgaaaaagctcggctttatgcgcgatctcttcagcatctggtacagtaccggtaacgtccgtaaaaagtgtcttcattattggaattaatggcttgctggctgctgtcagaggcaggagtatcagtaaactgagcagtataatgaattttttcatgggcgggacttccgtttcctgcgactttttttagaggagggcatacttattaataaaccgacggcgataaaaataacgcccataatgccgataaacccccatttaaaaaaattaacccacgggttatttatctcagccttttcaggatgcccgggagaataataaacattaactttatcgccttcgctgtcttcataaaaatcgctgccgatactgctattgaaaattagcgtgtaatctggcgtcggtcgaaaggcaacgacgggataccagctaccatctttacccgtgcgatgagaatgactggagtgccagacggtatcaacaatgacgccttcggtatgaatcgcgtctttgctataggtgaactggttataaaagacaacaacagaaatgaggatcagtaccagaccgataccgaggaatatacgaaagaaaactttactgtcctgactcattagccacatccttgctaactaaaaaacgggcggtaataccaccgcccgcttgctgaattaacgtcctgctttcagcttctgataatactcttcataaatgctgctggctgcgccaacgtcattctgccattcgccatttttaatggtttcagcatccgggtagagtgttttatcgttcgccacttctggacttaacagcttacgcgccgcaaggtttggcgttggataaccgatagtttcagcaacctgttttgccacatccgggcgcagcaggaagttgatcaatttcagcgcgccttctttgtttttggcatttgccgggatcgccaggctgtccatccagaaaatgccgccttctttcggccacaccacgtcaattggcgtacccgcctggcgtgcaacgaaagcagaaccgttccagatcatgccgaggttaacttcgccttccatgtacgggttcgccgggttatcggagttaaaggctgccacgtttggcatcagttttttcagctcgttatatgcagcttcaatctctttcggatcggtggtgttaccggagtagcccagcttacgcagcgccatctggaacacttcacgggcatcgtcggtcaacagcaggctgcctttgtactctggcttccacagatcggcccagctggtgacagatttcggatccaccgcatcaccgttaacaccaatcgccgtcgcaccccagatatacggaatggagtagtcgttattcgggtcaaaaggcttgttgagcatgtctggatcgagattgctgaagtttgttaacttgctcttgtcgatcttctggatcatcccttctttacgcattttatcaacgtaataggtactaggaaccaccagatcataggcaccgtctttgtatgttttcagcttggcgtacatggtttcgttgctctcgtaagtgctatagataaccttaataccggtttctttggtgaactgttcaagcagtcctggcggcacgtactcggtccagttgtagaaatacagcgtgttgttgtcatcggcgtgagcggcgctcatgcccagtgccagagcacccgccgcgagcaggtggcgactccattttttcatttaacgtcccctgtgttacctttcgttttatcacgagcaataagctggctggcaataaccatcaccaggctcagcaccagtaatatggttgccagcgcgttaacttccgggcttacgccgactttgaccatgctataaatttttaacggcagaatttcataacttggtccggtgacgaagctagaaactaccacatcgtccatgctcagggtaaagcttaacacccagcccgccgccaccgctggcattgccagtggcagaatgatttttcgcagaatggtaaattcgctggcaccgagatctttcgccgcttccagcattcgcacgtcaaaacctttcaggcggctatacaccgtcaccaccacaaatggcaggcagaaggtgatatggctgaacagcaggctccagaagccaagctgaatacccagcagcataaacagcaccagcaggctaatcgccatcacgatatctggactcatcatcaccacaaacagcattccgctaacgaacggcttaccacgaaagcgataacggtacagcgcaactgccgtcagactaccgataagcgtagcaaacgtcgcgctaaacaccgccattgttagactatgctgcgctgcctgtaacaggctgtcgttgttcatcagcaggctataccatttggtggtaaagccctgccagttgatgccaaagcggctgctgttaaaggagttcacaatcaaaataatgattgggatatacaggtacgcgtagatagcggtcataaaaccgccgcgaagcagtcgaccgatcattcgagttccaccttcttattcagcaaacgagaagcgcgccagtaaaccagcaacatcaggcccattacgatagtcagcgtaatgctggtagctgcaccaaacggccagtcacgaatattaaggaactggaccttgatgacgttaccgatcagcaggtttttcgcaccgcccatcaggtcggatacatagaacaggcccatcgctggcagcatcaccagcagacatccggcaataattcccggcatcgtcagtggaataatgatacggataaaagtctgtaacttgctggcaccgagatcgcgcgccgcctcaagcaacggcttatccagtttttcgatactggagtacagcggcatcaccataaacggcagcagaatgtaaaccagaccgataatcaccgcactgggcgtgaacatgatacggattggtgtgtcgataacgcccagccagagcaaaaactcgttgagatagcctttggtgctgaggaaaattttcagcccgtagatacgaattaaactgttggtccagaacggaacaatcagcagaaacagcagcagcggacgcaccttgtgtggcaacttcgccagaaaccaggcaaacgggtagcccagcaccaggcaggcgagggtggcgatcagcgccatattcaggctgtgcaatagcacttcaaaatagagcggatcgagcagacgcgtgtagttatccagcgtaaagaccattttgacaaaactggcgtcgtcgcgggtcaaaaagctggtgccaatgatcatcaggttgggcagaaagacaaacaacacaagccaaccgacaatagtgacaatcactacattctggaacttacttgtgttcttcatcagccagtacgacctcccagctttctacccaattaatggccattttttggtcgagagagtggtcaaagtcaggatcgtcttcattgaagaattcgctgaccatcaccatcttgccattttccagttcaacaacgctctccagcgtcatgcctttgtagttacgctcgcgaacgtaaccaatcagcccttcagcgtggttgtcgtcgttaatctcttcaacacgtaagtcttccgggcgcagcagaacatgcagtttttgccccggttcaacggcgaagttaacgtagatattacattcgcggccttcaacgttggcgcgtacgcgctgctcgtctagacgttcgatgacagtggcgttaaacatattgatttcgccaatgaagccggcaacaaacaggtttttcggctcttcgtagatttcacgcggcgtgccgtcttgctcaatgcgaccatcgcgcatcaccacaatcctgtcactcatggtgagtgcttcttcctggtcgtgagtcacaaagacgaatgtaatgccaagcttacgctgtaacgctttcagctcgttctgcatttgcttacgcagtttgtaatccagcgcactgaggctctcatccagcaacaacagacgaggcttgttaaccaccgcgcgagcaatggcgacgcgttgctgttgaccaccagagagctgatgcggtttgcgttgagcgaaggtttccaactgcaccatccgcagggcttccatcacgcggggcgtaatttcagcagcgggggttttttgcatgcgcaacccaaaggccacattttcgaacacggtcatgtgggggaaaagtgcgtagctttggaaaacagtgttcacatagcggttttccgccggaacgtgggtgatgtcctcgttatccagcatgatgcgtccggaatcaacagtttccagacctgcaatcaggcgaagaacggttgttttaccgcagccagaagggccaagcagcgtgaggaactcgccattgttgatagtcagatccagctggggaatgacctctttaccatcaaagcatttgcgaattcccgccaattgcaccagcggactaaggctactcggttgtttattcaattttttactctgtcccatgtaaacgcaacggatggcttaccgatgcggggtttgtggttaaccaccttggtgactcttaatgagggcggtaattctacggcaaaccgcttgaatcgccaatctttgttgtgaattactggcttagctttatattcattaaggtaatgctgataaatattcccgcttgcaggggtaaaagtgacctgacgcaatatttgtcttttcttgcttcttaataatgttgtcacaaaaagtgagggtgactacatggataaactacttgagcgatttttgaactacgtgtctctggatacccaaagtaaagcaggggtgagacaggttcccagcacggaaggccaatggaagttattgcatctgctgaaagagcagctcgaagagatggggcttatcaatgtgaccttaagtgagaagggcactttgatggcgacgttaccggctaacgtccctggcgatatcccggcgattggctttatttctcatgtggataccagtccggattgcagcggcaaaaatgtgaatccgcaaattgttgaaaactatcgcggtggcgatattgcgctgggtatcggcgatgaagttttaagtccggttatgttcccggtgctgcatcagctactgggtcagacgctgattaccaccgatggtaaaaccttgttaggtgccgatgacaaagcaggtattgcagaaatcatgaccgcgctggcggtattgcaacagaaaaaaattccgcatggtgatattcgcgtcgcctttaccccggatgaagaagtgggcaaaggggcgaaacattttgatgttgacgccttcgatgcccgctgggcttacactgttgatggtggtggcgtaggcgaactggagtttgaaaacttcaacgccgcgagcgtcaatatcaaaattgtcggtaacaatgttcatccgggcacggcgaaaggagtgatggtaaatgcgctgagcctggcggcacgtattcatgcggaagttccggcggatgaaagcccggaaatgacagaaggctatgaaggtttctatcatctggcgagcatgaaaggcaccgttgaacgggccgatatgcactacatcatccgtgatttcgaccgtaaacagtttgaagcgcgtaaacgtaaaatgatggagatcgccaaaaaagtgggcaaagggttacatcctgattgctacattgaactggtgattgaagacagttactacaatatgcgcgagaaagtggttgagcatccgcatattctcgatatcgcccagcaggcgatgcgcgattgcgatattgaaccggaactgaaaccgatccgcggtggtaccgacggcgcgcagttgagctttatgggattaccgtgcccgaacctgttcactggcggttacaactatcatggtaagcatgagtttgtgactctggaaggtatggaaaaagcggtgcaggtgatcgtccgtattgccgagttaacggcgcaacggaagtaagcgaaaagggatgcggcatgtgatgccgcatccggcttaaatccaaacttacccttcgaagaaccaatacccgctattgaccagcgccgcgagcatcgcgaggaaactcggatcttccagcgcatcgccaaaattctccgcagtcagcgcaatgttgctggcgagtgcatccagtgccggacggtgcggggaatcgatcttctcaccattggcatacacgtcgtcgccaatgcgcaatacgcgcagaccacccaggcgcaccagcacttcaccttgtttcagcgcatcgtagatttcatccggctgataaggcggctctggcggcgcgatatccagttcatgacgactctgggatataaactcgccaaaccattgcttaaagtgttccggctggttgatcaattcgagcatcatctcacgcagtttatccatctcttgcggcagaacatccgcaggatgagcgcgaggtggaacatccggatcgctgtagtagttgccgcccagttcacgttgcagcacataatcggcaaatccactaatcagttcccgcgtatttggcgcgcgaaagcccacggaatagttcatcgcattttccagcgcgtagccttcatgcgggaatcctggcggaatataaagaatatcaccaggctccagctcttcatcgatgatggcttcgaacggatcgacctgtaacagatccggatgtgggcagtgctgtttcatttgcagcttttcgcccactcgccagcgacgacgtccggtaccctgaatgataaacacgtcgtactgatcgagatgcgggccgacgccgccgccgggtacagaaaaagaaatcatcagatcatcaatacgccagtccggtagttcacggaacggtcgcatcagcgcggcggtcggctcatgccagtggttcactgcctgtaccagtaaactccagttggtttcaccgagatgatcgtagctttcgaacgggccgtggctgacctgccatttgccatcctggtgactgaccagtcgactgtcaacttcgctttccatcgccagacccgccaactcgtctggagagatcgggtcaataaaattattaaagccgcgttttaacaccaccgggcgtttctgccagtgacgttcaagaaaatcgggccagttaagagtgagttggtattccatgttaagcatccacaggctggtatctgcaaccgattataacggatgcttaacgtaatgcgtgaagtatgggcatatttattcatctttcggcgcagaatgctggcgaccaaaaatcacctccatccgcgcaccgcccagcatgctctctccggcgacgattttaccctcatattgctcggtgatttcgcgggctaccgccagccctacaccttgcccagggcgtaaagtatcaacccgttgaccacggtcgaaaatgacctctcgcttgcttaatggaataccggggccatcatcctcgaccacaatatagagatgctcgtcggtttgccttgcagaaatttcgacaaactcgaggcaatatttacaggcattatccagcacgttgcccatcacctcgacaaaatcgttctgctcaccgacaaagctgatctctgggctaatatcgagagagatattgacccctttgcgttgatacactttgttcagcgcactggtgagattgtccagcagtggggcgaccggatgcagctcgcggctgagcaatgtcccgccgcgcatactggcacgatgcaggtagtagccaatttgctgactaatgcggctgatttgctccagcattaccggctcagcatcactgacgctcatcttttcactacgcagagaacgcagcgtactttgcagcaccgccagtggcgttttcagactatgggtcaggtcggtgagcgtcgtacggtatttgtcgtaacgttcgcgttcactttttaacaatcggttcaggtttcgtaccagactggtcagttctcgcgttgtggctggattgagcaattcgcggttatgttcttccagttcgcggacttcttttgccagggcttcgatggggcgtaaactccaccaggcggcgacccacagcagcgggatcactaacagcagattggcactgagcacatagataaaccagctccagaccatataggaactttttagctccaccggaatggtatccaccaccacaatggttaattttggcatccggcttgttgccgggtagacgtttactgccacgctgtgggtcatctccgcgtcgtcatcatcttcccgcacttcctgcaactgttgctgtatgctatgatctccactcagcaagaggctggtatcgttaacatccgcttcaatttcatgaaaaccattgcttttcagccagtcaggctggatcatcttcatcagccagggcacgtcacgttgcgcccataaaagctgcccgttctcatcataaattagcgtcatggtggggctttgcttgtcgatattttcgggtaactcgacatgcaacttattgttttcccacttcgcaagggtatagaacagattgctctcgccacgtaacagccgaaacgtagttttatcgaaactgacgctataaccgatcagcgcgaccattccgtaggcaaggctaagcaccagtactaccgctgccgttgccaacagaaaacgtacccgcaggctgagcgggaaaaaaagacgcagtaattttttcatcagcgcaattcgaacagatagccctggccgcgaacggtggtaatcacttcttggggatattgtgcctgaatttttttgcgcagacgtcccatcagtacatcaatggtatggctttcccgcagctccgcatccggatagagttggagcattaagctatctttgctgaccactttgccattattgcgtatcaacgtttccataatagtgtattcgaacgcggtcagtttgatcacttcgtcattaatagataattcacggcgagagagatcaacctgaaacggggggaggctaatgacctgactagccagaccgctattacgccgcattaatgcctgcattcgcgccatcacctcttcaatatgaaacggtttagtcacataatcatcagcaccggcacttaatacttcgactttgtcctgccagctttcacgggcggttaataccagaatcggcagactaacatcgttgctacgccagcggcgaatcagactcagaccgtcctcgtctggcaatccgagatcgacaatcgcaatatccggtatatgttcattgagataataatcggcttctttggcatcttctgcgtcatcgacctgatgaccagcatcctgaatctgaactttaaggtggtgacgtaacaacgcattgtcttcaacaaccagtacgcgcatttttatttctccctgtcttaattattaaaatagtgtaacgcgattatgtggttatgggggtaaacattaaataaaccagcggggaggggaggtaaagtgaaaaaataaaaagcggataatcttaataagcaggccggacagcatcgccatccggcactgatacgaggtttatttcagctcatcaaccatcgtgatagctcgaccaatatagttagccggcgtcatcgctttcaggcgggctttctcttcttctggcaacgccagaccatcgataaactgcttcatgccttcggcgtcaacgcgcttaccgcgagtcagctctttcagcttctcgtacggtttttcgatgccatagcgacgcataactgtctggattggttcagccagcacttcccagttgtgatccagttcatccagcagatggtcacggttcacttccagtttgctcacgcctttcagggtggattgatatgcaatcaaggcataaccgatacccacgccgaggttacgcagcacggtagagtcggtcaggtcacgctgccagcgggaaaccggcagtttgcttgccagatgctgcaataccgcgttggaaaggcccagattcccttcggagttttcgaagtcgatcgggttaactttatgcggcatggtggaagaaccaatctcaccagcaatggttttctgtttgaagtggttaagggcgatataaccccagacgtcacggtcaaagtcgatcagaatagtgttgaagcgcgcaacgcaatcaaacagttcggcaatgtagtcgtgcggttcgatctgggtggtgtacgggttccactgaatacccaggctggtgacgaactcttcgctgaactgatgccagtcaacttccgggtaagcggcgatgtgggcgttatagttaccgaccgcgccgttgattttgccgaggatctccacctggttaagctggcggtactggcgctccatacggtaggcgacgtttgccatctctttaccgatggtactcggcgtggctggctgaccgtgggtacgagacagcagcgggatatcgcgatactgaacggcgagatctttaatgccatcaatcagttgacgccagtatggcaggatcacttcatcacgcgcggttttcagcattaatgcgtgggagaggttattgatatcttcgctagtacaggcaaagtggatgaattcagaaaccgcgtgcagttccgggatctccgccactttttctttcaggaaatactcaaccgctttaacgtcgtggttagtggtacgctcgatagttttgatgcgcgccgcatcttcttcgctgaaactggcgacgattgcatcaaggtaaccgattgcgtcggcagcaaaagcaggaacttccttgatcgctgcgtgcgcggccagtttttgcagccaacgtacttcaacttgtacacggaatttcagcaaaccatattcgctgaaaatcccgcgcagcgcgctgactttatcgccgtagcgtccatcgacaggggaaacggcggtcagactggataattccatagatcacaactccggggttaaatgagcaagaatttgttttgcctgagtggtcaggcgattacgagaaaacatcagttgcagacgtccgccgccgacctggtgccagagcacggcggcgcgaatgcctgccagcagggttgcgcgaactttcgcctgcacttgtgggctttgcagtacagcaggggaaccggtgacctgaatgcgcgggccaagcgggctaatcacatcaacatagatagcagccatcgcgctcatcagcgtttcggactgtaaatcgaagtgttcgagctggcgttgcaggccgttgatccggttgcccagagtgtcgagcgcgcctttcgcactggagagtttgcgctcaagcaccatcaagctgagtgtgtagcgggttaattcggcgtttaagccctggcgactgctggcattgagcacgccgagcagggtttccagcccgacgcgcaggttggcttcgctaccgccaaaaaccgccagcgtgctgctggggttcatatcaataatactgttgagactgacgtgtagcgcatcggcatcacaatgcccctggtgagcgagttgttgcaccaggcgtgcgctctgacaaataccggccagggcgagggtgatgtcatagtaattctttgccacgttcactgcttccttgttttaagtaaagataataatcagaccggcagcggcagacgctgctcaataataccgccaccgaggcacacttcaccgttatagaagacggcagactggcccggcgtcacggcggcaaccggttcatcgaaaatcacttcaatgcgatcatcgtccagcgccttgacggtgcaagggatatcggtctggcgatagcgggtttttaccgtgcaacgcatagtgccggtgaatggttcgcgatcgacccagtgcaactgctgggcaatcaacccgacagacatcagccgcgggtgttcatggccctgagcgacaaccagaatgttgttttcgacgtctttgtccaccacataccacggttcttcggtaccttctttggtgccaccgatacccagacctttacgctgaccgagagtgtgatacatcagcccctggtgctcaccaatttcatcgccatcgacggtaatgattttgcccggttgcgccgggagataacggcccaggaactcgcggaatttacgttcgccaatgaagcaaatgccggtagagtcttttttcttcgcggtgaccagaccaagatcttcagcaatcttacgcacctgcggtttttccagttcgccgaccgggaacaggctttgcgcaatctgctcatggctgagcgtataaaggaagtagctctggtctttattgctgtccagaccacgcagcaggcggctcttgccatcgacatcggcccgacgtacgtaatgaccggtagcgatataatcggcacctaaatcttcggcggcaaattcgaggaaggctttaaatttgatctctttgttgcacagaatatccggattcggcgtgcgaccggctttatattcggcaaggaacagttcgaagacgttgtcccagtactcggcagcaaagttaacggtgtgcagttcaatgccgagcttgtcgcagacagcctgggcatcagccagatccgctgccgctgtgcaatattcctcaccgtcgtcttcttcccagttcttcataaacaggccttcgacctgatatccctgttgttgcaacagccaggcagaaacggaggaatcgacaccgccggacatgccgacgattactttttttgcggtttcagacattggatcactcacgacattgaacttcaaggcggcgtattctatcacgcagccttttagatgacaccctttgtaaaaggccagttaaaatcgccaatcatctccagcggataacgttgcccgctttgataacaacgaatactttccgccaccagcgggctacgaagattactcgcctgtaaaatttcttcggcgctgacccaacggcagcagtcgatatcgctgtcatgaggctgggtcgggcatatttgctcaagctcaatggcaaagaggaaacgcaaaaacggcgttttatctggcgcaatccactgatgcatacgaataaagtgttgcggctgcgcgctgatgccggtttcttcccacagttcacgggcggcggcttccactaaggtttcatcggcttccagatgcccggcaggttggttccataacgctttaccattaatcgtctcttcaacgactaaaaatttgccttctgcgtgcaccacgcaagcaacggtaacgtgcggtttaaacattttgcatccttaatctgtcacttctcgccattcaccattggcaagattatccaaagagtaatcacccatcgcatagcgaatcagtcgcagcgtggggaagccaacatgggcggtcatgcggcgcacctggcgattacgtccttcatataaggtgatcttcagccagctggtgggaatacttttgcgttcacgaattggtggattccgcggccataaccacgcgggttcgtcaaccagctccgcgccggcgggcagggtagggccatcatttaaggttacgccattgcgcaaggcttcaagtgcgtcttgtgtgggaataccttccacctgcacataatagatttttccggtgcgtttacccggctgggttaaacgcgcctgcaacgcgccgttattggtcagcaccagcaacccttcgctatcgcggtcaaggcgacctgctgcataaacaccctgaaccgggatgaattcttttaatgttttgcgtccggcttcatcggtgaactgcggaagaacatcgtagggtttattgaacaggatcacacgcgtgggctggttttcaggtttacgcctggtagaacgttggctgctgaatcgcttaacctggtgatttctaaaagaagttttttgcatggtattttcagagattatgaattgccgcattatagcctaataacgcgcatctttcatgacggcaaacaatagggtagtattgacaagccaattacaaatcattaacaaaaaattgctctaaagcatccgtatcgcaggacgcaaacgcatatgcaacgtggtggcagacgagcaaaccagtagcgctcgaaggagaggtgaatggaaagtaaagtagttgttccggcacaaggcaagaagatcaccctgcaaaacggcaaactcaacgttcctgaaaatccgattatcccttacattgaaggtgatggaatcggtgtagatgtaaccccagccatgctgaaagtggtcgacgctgcagtcgagaaagcctataaaggcgagcgtaaaatctcctggatggaaatttacaccggtgaaaaatccacacaggtttatggtcaggacgtctggctgcctgctgaaactcttgatctgattcgtgaatatcgcgttgccattaaaggtccgctgaccactccggttggtggcggtattcgctctctgaacgttgccctgcgccaggaactggatctctacatctgcctgcgtccggtacgttactatcagggcactccaagcccggttaaacaccctgaactgaccgatatggttatcttccgtgaaaacagcgaagacatttatgcgggtatcgaatggaaagcagactctgccgacgccgagaaagtgattaaattcctgcgtgaagagatgggggtgaagaaaattcgcttcccggaacattgtggtatcggtattaagccgtgtagcgaagaaggcaccaaacgtctggttcgtgcagcgatcgaatacgcaattgctaacgatcgtgactctgtgactctggtgcacaaaggcaacatcatgaagttcaccgaaggagcgtttaaagactggggctaccagctggcgcgtgaagagtttggcggtgaactgatcgacggtggcccgtggctgaaagttaaaaacccgaacactggcaaagagatcgtcattaaagacgtgattgctgatgcattcctgcaacagatcctgctgcgtccggctgaatatgatgttatcgcctgtatgaacctgaacggtgactacatttctgacgccctggcagcgcaggttggcggtatcggtatcgcccctggtgcaaacatcggtgacgaatgcgccctgtttgaagccacccacggtactgcgccgaaatatgccggtcaggacaaagtaaatcctggctctattattctctccgctgagatgatgctgcgccacatgggttggaccgaagcggctgacttaattgttaaaggtatggaaggcgcaatcaacgcgaaaaccgtaacctatgacttcgagcgtctgatggatggcgctaaactgctgaaatgtagtgagtttggtgacgcgatcatcgaaaacatgtaatgccgtagtttgttaaatttattaacgggagcgtaacgctcccgttgttttttgttaggctgctaacggttatcaaaattttatcaaaaaaagttatcaaaacccctcggtagttttggggtaggctggccggtcaggtggtagttctactactagtctcccacatagatattccttagctttttattattgctggcggacgctcgttaatatttaaggtcttcattgattaagacatccccaaagttagttatgtattcactgttattaggacaattatgaattaccactccttacacccgctcaaatattgttaaattgccggttttgtatcaactactcacccgggactcgccaggggacagccaacaggcattgggtgcaatcaccttagcgttcaggtacatgcggaatgtaaaaaaggccgcgagcgcggccccttcacatacatctttagtactgagactgtttaacctagggaattattatcgtattatattgcattacaactcccaacagtgacatatgaacttcctgctttactccacgactttaatatttcaaggccatgtgaagaacatatttcttgcactgcgagttcatcgagtaatccatagtaagaaacactttttgaatttttgtaaatgtatccgtaaagatgttttcttcctgtttcgtattttttgaagtatgagcttttatattgatttacaataagagtctcacctcctgattttagtaatctcttgatgctaagaactatcagataattcaaagcgtggctgtgatgataggaattatgttttttacgtgaatgagaataatcttaaatgaggaataactcattgattgacaatatttttattcaagaagtgtcattgactgttaacgcaatgttgtaaaggtaagataatctgatttatcaatattattgtgtgatttttatgtgagcagaagatattcatcagcaacgattacattagtcattttattttgccgacggcctcattgtcgaaagataagcgtacgacagtattatcagaaaagagtgattttttatccaactacacttcagcgcactgcgtgtaaaaaatgcctctttcttatgcgggatatcatcatttcatcatgatgtctttggtgagcggtgaacacaatgcacctgcgctgtctcttcaggatgaatcccctggtctggtgcctgcgggctgatgttgcagcagagcttaggagtcttagacgctactatcatttatccaatggcatggaaagcaaaagtgtcgatacccgcagtatatatcgtgaactgggtgcaacgctgagttacaacatgcgcctggggaacggtatggaaatgaaccctggctgaaggcggctgtgcgcaaagaatttgtcgatgataaccgggtgaaggtgaataatgacggtaatttcgtcaatgatttgagcggcagacgtggaatataccaggcagctattaaagccagtttcagcagtacgtttagcggacatctcggggtggggtatagccatggtgccggtgtggaatccccgtggaacgcggtggctggtgtgaactggagcttctgaccatcaacgattaaactgcgcttcggcgcagttttcgtttacaggatgttgaaagggaaaattctggggcaaaaaaagcccgccagttacggcgggaaacctcatcctatgggagaacaatgaataatgaaattgcggggttatcatctcccagtatatccatactaacaataaggttatttactcaaccaggcataaacattttgttttgtgcgtgggaacagccttaaggtgtaaagggggaggtggaaatagcaatgaggagtatcagcaagaatactcgccgctttaccacaacgtggatgagagggatgaaaaactcaaggcagagataactctgccttgaagataaatgcgcttttacagcgggcttatttcagctcttctgcttccggtaaggtcacgttcagctcaagaatagaaatatcgccatctttttgctcaagctgtacggttaccatctcaggatcaatttgtacgtatttacaaatgacctcaagaatatctttacgcaactgcggcagataatgcggttctgcatcgctgcgacggcgttcagcaacaataatctgcagccgttcttttgcaatgttggctgtgtttttcttccggctgagaaagaaatcgagtaatgccataacttatcctccgaacaagcgtttgaggaagcctttcttctcttcttcaatgaagcggaaaggacgttcttctcccaacagacgttctacggtatctgcgtaggctttacccgcatcggcgttaatgtcgagaatgaccggttcaccctggttagaggcgcgcaatacactttgatcctctgggatcacgccgacgagtttgatgcgcaggatctccagcacatcttccatgctcagcatgtcacctctgcttacgcggcctgggttatagcgcgttaacagcaggtgctctttaataggctcttcgccattttctgcgcggcgacttttgctcgccagaatgcctaaaatacggtcagagtcgcgtacactggagacttccgggttggtggtaataatggcttcgtctgcaaaatagagtgccattaacgcaccggtttcaatccctgccggggagtcacaaacgataaattcaaaatccatcgctttcagatcatcaagaactttggcgaccccttcacgggtgagggcatctttatcgcgtgtttggcttgccggcagaatatagagattttcagtacgcttatctttaattaacgcctgatttagcgttgcatcgccctgaatgacgttgacgaaatcgtaaacgacccggcgttcacaacccataatcaggtcgagattacgcaggccgatatcaaaatctatcacgacagttttctttcccttctgggccaaaccagtggcgatggccgcgctggaggttgtcttaccaacaccccctttgccgctagtaacaacaataatgcgtgccatagaaattccttgttaaaaagggatcaatttaacggttgaacggtcaaagcgttttcgactaactgcagtcgcgccgctttgccataaaattctgctgggatttgatcactcagccagtattcacctgcgatggacaccagttccgccatcaggttcgtacaaaatatttgcgtttcccggtcaccacttgcccctgccagcgcacgaccgcgcatcatgccatagacatgaatgttcccatcggcaatcaattcggccccagcgctaacgtggcttgtaacaatcagatcacattgtggagcataaatacgctgaccggaacgcaccggggtatctattaaacgcgtttttgtgaccggcgttgtattttgcgctggagcctgcggtgtgggagctggacgtggcgctttttcctttccttccgtcaggataggcagccccatcttttcaatttcggctttaagttgcgcatctttgcagccacttacgccaataacccgcaaaccggttgcgctaaccgccttatgcatcgcactccagtttaccgggtcttccagtgcactgacgttgagtacaacgggggcatgttttaaaaatgcgggggcctgagcgattttgtcttccagcgcctgatggataaccttaggttctgcctcatgcagatgaaccacagataaagtgaagctactgcctttaagctcgattggcgtgttactcatcctggccttactcaattagctattaatcatcgccagcgcgcgatgatgttccgaagactataaggcatgttatagtctggattatattgaggcaagtcaccctcccatttattcagagtaaaagtctattctgtgataaatggcgctgattcatagcttaaaaaatacccttgtcaatcaacccattgccgtcgtacttttgattgttcttatttacgcttcctttttccgcaccctaatcgtgacagcatctccagacctgtttaaatatccagtattgaggcaagtgtattttttcaccacgccaggctttcttaactttccattttttgcggcatcattaaagaacagatacccgttatcttaatatccgccacagaattgctctatcatagaaaccgcagaagacgtctgatacttctgtcaggtcatcgtaactcgtccaggtcagcggttttgattacggattgatgatgaaatgagcataagtgttgtacggttggattatcaggatgtgctatgaatatgatgcgtattttttatatcggattgagtggtgtggggatgatgttcagtagtatggcgtctggaaatgacgctggcggacttcaatctccggcgtgcggcgttgtttgcgacccgtatatttgtgtgaacagtgatggcatttccccagagttaacaaggaaatatctcggcgaaaaagccgctgaaaacttacaaagtttacaaggctacgatcccagcgaatttacattcgctaacggtgtattttgcgatgttaaagaaaaattatgtcgtgatgatcgttattttggtgtggatggtaagcggagtggaaaaatcaatcaaaccaccacaaagatgttatttatgtgtcgtgagtgatgtcttgtttacattatgttctattcgtcattaacctcttgagcgacagagaggagtggggcattaacgtttatgacggggagagtccccgtcggttgacatttacttaatttgaatatcgacgttatattttttagttttgtttttacgggcgtcgtttcgggtttgcaacactcgcagctcatatttgccagaagcagggagactgtattgtccgtgactatcgagttctggggaatatctggataaatcaacactatcatcgattcctggcccgaagaggtaagtatcagcgccttcattagagatactcacatgcactttctgaccttttttggcatagaaggtatatgtatcgtaatcgtatccctttatttcgccggagtactgagcgctgctatggccttttctgaactcaacattgacattcttacccgcagcaaagctcgtggaggttagcagtgcaagcagcaatacagccttcctgatgctcttgattttcattggtagtctcctgttcagaatgagtacgatgaactgttataatataacaatccctaacgggagaattccagtggctttcctgcgttcggtaaaatcacgttgcggcatttttgccggggggattacttataaagggggcatggactcaacaaaccgtagaaatctacagctggctggcttgtggcgcgggtttcattgatgttagcttatgccaaaacctggcatcttaaagagtaaaagtatgttttgtgtgatttatcgaagcagcaagcgtgaccagacctatttatatgtcgaaaaaaaagacgattttagccgtgttcctgaggaactgatgaaaggttttggtcagcctcagttagcgatgattctgccgctggatgggcggaagaaactggtcaatgccgatattgaaaaggttaaacaggcattaaccgagcaaggttactatttgcagttaccgccaccacccgaagatttgctgaagcaacatctttccgtcatggggcagaaaacagacgacactaacaaataaccgatatccggcggtggcattatctttgtcggcgcgggttttcatatccacgataaggtgaggggaacgttatgtatcaacatcacaactggcaaggtgcgctgctggattatccggtgagtaaagtagtctgtgttggcagtaactatgccaaacatattaaagagatgggcagcgcagtgcccgaagagccagtgctgtttattaaaccagaaacggcactgtgcgatctgcggcagccattggcgatcccatccgatttcggtagtgttcatcatgaagtcgaactggcggtgttgattggcgcgacactgcgtcaggctacggaagagcatgtccgcaaagccattgccggttatggcgtggcgctcgatctgacattgcgtgatgttcagggaaaaatgaagaaagccgggcagccgtgggaaaaggctaaagcgtttgataactcttgtccgctttccgggtttattcccgcggcggaatttaccggcgacccgcaaaatacaacgctgagcctgagcgtaaacggcgaacaacgccagcaaggtacgactgcggacatgatccataaaatcgttccgctgatcgcttatatgagcaagttttttaccctcaaggccggtgacgttgtgttgacaggcacgcctgatggcgtcggcccgttgcaaagcggtgatgagctgacagtcactttcgatgggcattctttgacaactcgcgttttgtaatactttttgccgcctgaaagcggcggcaaaacttgcatcgctgtgccagactggttataaggtgcgttttaacgtaatggcggaacacctgatgagcgatgtacctttctggcaaagtaaaaccctggacgaaatgagcgatgcggaatgggagagcttgtgtgatggttgcggtcagtgttgcctgcataaactgatggatgaagacaccgacgaaatctacttcactaacgtcgcctgtcgccagctcaatattaaaacctgtcaatgtcggaactacgaacgtcgtttcgagtttgaacccgactgcattaaattaacccgtgaaaatctgccaacattcgaatggctgccaatgacctgcgcttatcgtttgctggcggaaggtaaagatttacctgcgtggcatccgctacttactggtagcaaagcggcaatgcatggtgaacgtatctctgtgcgtcatatcgcagtgaaagaaagtgaagtgattgactggcaggatcatatcttaaataaacctgactgggcgcagtgataaatttaatagatgctgatgggggctttcttaatatacgtctggatgctcgccatttcgtagccctgtttttgaaagcgctctgtcataatgagagttacccgataccttattatcaacaggtaactctcaatctttaaaaaacgtctgtgtttttaaatgtgataaaccttataccttgagtacatggagagaataatcgcttatcagacttcaggtacctcaaagagtgtctttttaccgtgtcttttctgatactcattacaggtgttaatcatttttttggccgcttcttttagcaaagaaagcattaaatcatcataatcaacgtagaatctggttgtttcagtttccgtttttatctcaccgatggcggctatttcggtggttaatttcaatttggcggcatcgatatctttattcgcttgtttaaccgtgttagacagggtggtaaagaaattctgcacagattttaacttgttcttcaattctggaatcagttttccttcaactacgcccgcagcaatagaataggaaatgattaatccaaatggaccggcgacgacaccggctgcggcaccggcatatgcttccttcctgattttatctacctgactctggaaatagctgcttttttcactaaaatcattggttaactggctatctaacgccagcagtttcccggaagcgttgttgaaactttgactgcttaccagcagggatttttgcgcttcattcagcttcgtgatgccgtcatccagtaccttaatgagaatgtctttctgggcggatgctttcttctcattgtactcatcaaatagcaaaatatacgctgcgagcaattgcgtcgcaacaccacaccattcatacactgtttgggttgcttcaaaatacttatcctggctatccataagtaaggttttaatatcgccgactaaaacggaggctgcctgactatactcctgtttaaagcgacttaactcttttatggtttcatcaaaggtctgccaggggatgacctgatcgagatatttattataaagatctaatgctccatctgcggtttcgattgcgtttttaactacttctaccgttttatctgcaacgatttcagtcataatcattcgcctctttaaatatataaattgtaatgaaactcctgttttacaactattaataaattttacttcatctaattcatagttagccgggcgggatgcgtcaatgtctttatttctattaatatgataaatatcaaacaatgtttaatgtcattatggcgaatgcttctattctattttttagccgggtgatatttttcatttctgctggatgagcgtcgtcgccagaaggccacgtgagcacaagataagagaacgaaaaatcagcagcctatgcagcgacaaatattgatagcctgaatcagtattgatctgctggcaagaacagactactgtatataaaaacagtataacttcaggcagattattatgttgtttatcaagcctgcggatctccgcgaaattgtgacttttccgctatttagcgatcttgttcagtgtggctttcctagtccggcagcagattacgttgaacagcgcatcgatctgaatcaactgttgatccagcatcccagcgcgacttacttcgtcaaagcaagtggtgattctatgattgatggtggaattagtgacggtgatttactgattgtcgatagcgctattaccgccagccatggtgatattgtcatcgctgctgttgacggcgagtttacggtgaaaaaattgcaactacgcccgacggtacagcttattcccatgaacagcgcgtacagccccattaccatcagtagtgaagatacgctggatgtctttggtgtggtgatccacgtcgttaaggcgatgcgctgatgtttgccctctgtgatgtaaacgcgttttatgccagctgtgagacggtgtttcgccctgatttatggggtaaaccggtggttgtgctaagcaataatgacggttgcgttatcgcccgaaacgctgaggcaaaggcgcttggcgttaaaatgggcgatccctggttcaaacaaaaagatctgtttcgtcgctgtggcgtggtttgctttagcagcaattatgagctttacgcagacatgagcaatcgggtgatgagcacgctggaagagctaagcccccgcgtcgagatttacagtattgatgaggcattctgcgatctgacaggtgtgcgtaattgtcgcgatctgactgattttggcagagaaattcgcgcaacggtgctacaacgtacccatcttactgttggtgtggggatcgcccagaccaaaacgctggctaagcttgccaatcatgcggcaaaaaaatggcagcggcagacgggtggggtggtggatttaagtaatctggaacgccagcgtaaattaatgtctgctctccccgtggatgacgtctgggggattggacggcggatcagcaaaaaactggacgcgatggggatcaaaaccgttctcgatttggcggatacagatatccggtttatccgtaaacattttaatgtcgtgctcgaaagaacggtgcgtgaactgcgcggcgaaccctgtttgcaactggaagagtttgcaccgacgaagcaggaaattatctgttcccgcagctttggtgaacgcatcacggattatccgagcatgcggcaggccatttgtagttacgctgcccgggcggcggaaaaacttcgcagcgagcatcaatattgtcggtttatctccacgtttattaagacgagtccatttgcgctcaatgaaccttattacggcaatagcgcgagcgtaaaactgctgacgcccactcaggacagcagggatatcattaacgctgctacgcgatctctggatgccatctggcaagcgggccatcgttaccaaaaagcgggcgtgatgctgggggatttcttcagtcagggagtcgcgcagctcaatttattcgatgacaacgcaccgcgccccgggagtgagcaattgatgacggtaatggatacactgaatgctaaagagggcagaggaacactctattttgccgggcaggggatccagcaacaatggcagatgaagcgagccatgcttagtccacgttatacaacgcgaagttctgatttactgagggtcaaataaatatagcggcaggaaaaaagcgctcccgcaggagcgccgaatggattagcgaccgaacagatcacgttttttcgctttaaacggctgggaaatcaccaccagcactgcgacaatcaggtaagcgataaaaataccgagcagccactgcggcatttccagacctaaaaaatcccactgacgctcggcgcaatcgccagaggcgacaaacacttgcggcacccacttatccagcggcagccattccgggaaacgaaccataaaatcacaggtggcaaacgggctaggatagagctgaagcatggtgtgctcgtaagttaactgcacaccgcggaacgcactatacaaccagataaccatcgctacataacgcagcggagttttcggggcgatcgcgccaatcagcgcagcacccagaacgccgaataacgcgcagcgttcataaatacagagcacgcaaggtttcagtaacatcacatgctggaaccacagcgccgtcagttccagtgccagagcagtaaacgccatcaacagccacgcgccccggccttgactacattggttcaaaaatcgcaacataatcatttccctgcaatatgcatagagtgcgcagtttaaaccaattcattcgctgcgccaccaggaggcagcaaaaataggacgcaattggacaattatcgggcgaaaaggcaaaccgggcatttgtatgcccggtaagttgttatcaaagcgttgctatccagcccatttgcataaaccattcggttacaggggcaagcgtaaactcgacgcagagcaagccgacgagtgtcaggacgagggtgtaaggcagggccatccacaccatgcggccataagagaggcgaatcaatggcgcgagtgcagaggtcagcaggaacaggaacgcagcctgaccgttcggcgtagcgacggagggcagattggtaccggtattaatggcgaccgccagcagctcgtattgcttcaacgtgatagcgccactttccattgccgctttcgcttcgttgatataaatcgtccccacgaagacgttatcgctaatggaactcagcagaccgttgaaaatatagaacaggctcagctgagcatgttcgcttgcctgcaacacaaactgaataattgggctaaacagttgttggtcgataatcaccgcgactacgctgaaaaacaccgtcaacagtgcggtgaatggcagagattcggtgaaggctttaccgatagcatgctcatcggtgacaccggtcaaacttgttgccagaataatgacactcaaaccaatcaagccaacttccgccagatgcaacgccagcgcagtcaccagccagacgccaataatcgcctggacaatcagacggattttatcctgacgggtacgctggtggcggctttgatcgtcaaactgttgcaacacttcgcggactttctccggcagcgtttcaccgtagccaaaccaacgcagcttctctaccagcaggcaggttaacaggccacaaatcagaaccggaacggtcaccgggctcatgcgcaggaagaaatcgccaaaatgccagccagccgctttagcgatgatcaggttctgtggttcgcccaccatggtcattacgccgcctaatgcggtgccgacaccggcatgcatcatcaggctacgcagaaagccacggaactgttccagaaccactttgtaatgcttgtcgatatgactatcgtcttgcaggtcggtgtcttcggtacgggaagaggctacgcggtgataaataccataaaaaccgactgcaacgctgatcaccaccgccacgacggttaaggcatcgaggaacgcggagaggaacgcagccgccacgcaaaaagagaggctcagcagcattttggagcgaatgcttaacagcaaacgggtaaatatgaacagcaacagctgtttcataaaatagatacccgccaccataaacatcagtaacagcaagacttcaagatttgccgccacctcttcacggacgtgttccgcgctggtcatgccgatgaataccgcttcgatagccaacagaccaccggggagcagcgggtagcatttcagggccatcgccagagtgaaaataaattccgctaccagcaaccagcccgcgacgaaagggctgatgaggaaaattaacgggtttacgattaagaaaatgatgagggcgagtttgtaccagtcgggggactggcccaaaaaattgcgccatagcgcgcggccccaggagatctccatgatggtttcccttaccttacaaataatcaatgatgtttttatgtttaaacgcaaagcttaacggtcaggcaggagtgaggcaagtcttgatagtcaaggggaaagagatgcggaaaatgaagccttgatccctttttcttctttttgtctgctatcagcgtagttagccctctggtatgatgagtccaactttgttttgctgtgttatggaaatctcactatggtcattaaggcgcaaagcccggcgggtttcgcggaagagtacattattgaaagtatctggaataaccgcttccctcccgggactattttgcccgcagaacgtgaacttagtgaattaattggcgtaacgcgtactacgttacgtgaagtgttacagcgtctggcacgagatggctggttgaccattcaacatggtaagccgacgaaggtgaataatttctgggaaacttccggtttaaatatccttgaaacactggcgcgactggatcacgaaagtgtgccgcagcttattgataatttgctgagcgtgcgtaccaatatttccactatttttattcgcaccgcgtttcgtcagcatcccgataaagcgcaggaagtgctggctaccgctaatgaagtggccgatcacgccgatgcctttgccgagctggattacaacatattccgcggcctggcgtttgcttccggcaacccgatttacggtctgattcttaacgggatgaaagggctgtatacgcgtattggtcgtcactatttcgccaatccggaagcgcgcagtctggcgctgggcttctaccacaaactgagcgcgttgtgcagtgaaggcgcgcacgatcaggtgtacgaaacagtgcgtcgctatgggcatgagagtggcgagatttggcaccggatgcagaaaaatctgccgggtgatttagccattcaggggcgataatcccttccgtttaaagagcaaacccctcaaacgaggggttttttgttgtttttacagatttcccattcttggcgggcaacgttccagcaactcgatgctgccgtcttcgttttgctgttcgagcatcacatcaaatccccacaggcgatgcacatgcttcaggacttctttgcgcccccgatccagcggtgcgcgattatgtggaatataacgcagcgtcaggctacggtcgccgcgcaaatccacgttccagatctgaatattcggctccagattacttaagttatattggctgcttaaccggttacggatctcccgataaccttcttcattatgaatagcggaaatctccagataattatgccgatcgtcatccagcacggtgaagaagcggaaatcacgcatcactttcggactcaggaactggctgataaaactctcatctttgaaatcacgcatcgcgaaatgcagcgtttccagccagtcggaaccggcgatatccgggaaccagtatttgtcttcttccgttgggctctgacaaatccgtttaatatcctggaacatggcgaacccgagggcatacgggttgatgccgctgtaccacgggctgttataggggggctggaagaccacattggtgtggctgtgcaaaaactccagcataaaacgttccgttactttcccttcatcatacagatggttaaggatggtgtagtgccagaaggtcgcccagccttcgttcatcacctgagtctgtttttgcggataaaaatactggctcaccttacgcacaatacgcaggatttcacgctgccaactttccagcagtggcgcatttttctccataaaatagagcaggttttcttgtggttcggacggatagcggcgcgcttcagcaaccgttttctcttcctcgcgcttcggcagggtacgccagagcatattgacctgactttgcagatactcttcgcgacttttctgccgggctttctcttcttgcaggctgattttttgcgggcgtttgtaccggtccacgccgtagttcatcagcgcgtggcagctgtccagaagccgttctacttcatcaacgccataacgctcttcgcactcggtaatatatttacgggcaaaaatcagataatcgacaatgctactggcgtcggtccagctacggaataagtaattgtttttgaagaaagagttatgcccatagcaggcatgagccatcaccagcgcttgcatggtaatggtgttctcttccatcaggtaagcgatacacgggttagagttaatgacgatttcataggccagtccttgctgaccgtgcttatacagccgttcagtctcgataaactttttaccgaaactccagtgcggatagttaattggcatgccgacgctggagtaggcatccatcatctgttcactggttatcacttcaatctggtgcgggtaggtatccagccggtagagtttcgccacccggtctatctctgccagataaacatccagcaggtcgaacgtccagtcgggtccatcgctcaaacgtgtggtgtccttattcatagaatcgatcgtcgccatacgcgcacctcattgttgtcggcgctctctgtgtggagcacctcatttcaagcatagaacacctgttaaaaaccgcgtcgccggagaatttttttctttgcgatttcttattatcagagtgccactaatccgcttctgaacggaattttatgctggataaaaagggcgttcagcaggagatactaaagacgccatattgccgcagagtcagggagatgtgagccagctcaccataaaaaagccgcatgttgaataatattttcaactgagttatcaagatgtgattagattattattcttttactgtatctaccgttatcggagtggctatgcgagttgtcatactgggaagtggtgtggtaggcgttgccagcgcctggtacttaaatcaggcaggacatgaggtcaccgtcattgatcgggagccgggggccgccctggaaaccagtgccgcgaatgccgggcaaatctcccccggatatgctgcaccgtgggcggcaccaggtgtgcctttaaaagcgattaaatggatgttccagcgccatgcgccgctggcggttcgtctcgacggtacgcagttccagttgaaatggatgtggcaaatgttacgtaactgcgacaccagccactacatggaaaacaaagggcggatggtgcgtctggcggaatacagccgtgattgcctgaaagcattgcgcgccgaaaccaatattcagtatgaagggcgtcagggtgggacgctgcaactgttccgtaccgaacaacagtatgaaaatgcgacccgcgatatcgccgtgctggaagatgccggcgtaccgtatcagctgctggaatccagccgcctggcggaagtggagcccgcgctggcagaagtggcgcacaaactgacgggcggcctgcagttacccaatgatgaaaccggagactgtcagctatttacccagaatctggcgcggatggcggagcaggcgggggttaaattccgctttaatacgcccgttgaccaactgctttgcgacggcgagcaaatctacggcgtgaagtgtggcgatgaagtgattaaggccgatgcgtatgtgatggcgtttggttcttacagcacggcgatgctcaaaggcattgttgatattccggtgtatccgctgaaaggctacagcctgaccattccaattgcgcaggaagatggtgcgccggtatccaccattcttgatgaaacctacaaaatcgccattacccgtttcgataaccgcattcgtgttggcggaatggcggagattgttggttttaataccgagctgttgcaaccgcgtcgtgaaacgctggagatggtggttcgcgatctctatccacgcggcggtcatgtcgagcaggcgactttctggactggtctgcgcccgatgacgccagacggcacgccggttgtcgggcgtacacgctttaaaaatctgtggctgaataccggtcacggcacgctcggctggacgatggcttgcggttccggtcagttgttaagcgatctgctctctggtcgcacgccagcgatcccatatgaggatctaagcgtagcgcgctacagccgtggatttacgccaagtcgtccgggccatttacatggcgcacacagctaaggaaacgagatgacccgtccgatacaggccagcctcgatctgcaggcattaaaacagaatctgtccattgtccgccaggccgcgacgcacgcgcgcgtctggagcgtggtaaaagcgaacgcttacgggcatggtattgagcgtatctggagcgcgatcggggccaccgatggctttgcattgcttaacctggaagaggcaataacgttacgtgagcgcggctggaaaggaccgatcctgatgctggaaggatttttccatgctcaggatctggagatttatgaccagcaccgcctgaccacctgcgtacacagcaactggcagctcaaagcactgcaaaatgcgcggctaaaagcaccgttggatatttatcttaaagtgaacagtgggatgaatcggttgggcttccagcccgatcgcgtgcttaccgtctggcagcagttgcgggcaatggcgaatgttggcgaaatgaccctgatgagccattttgccgaagcggaacatcctgatggaatttccggcgcgatggcgcgtattgagcaggcggcggaggggctggagtgtcggcgtagcttgtccaatagcgcggcgactctgtggcacccggaagcgcattttgactgggttcggcctggcattattttgtatggcgctagcccgtccggtcagtggcgtgatatcgccaataccggattacgtccggtgatgacgctaagcagtgagattattggtgtccagacgctaaaagcgggcgagcgtgtgggctacggcggtcgctatactgcgcgcgatgaacagcgaatcggcattgtcgccgcagggtacgccgacggttatccgcgccacgcgcctaccggtacccctgttttagtggacggcgtgcgcaccatgacggtggggaccgtcagcatggatatgctagcggtcgatttaacgccttgcccgcaggcgggtattggtacgccggttgagctgtggggcaaggagatcaaaattgatgatgtcgccgccgctgccggaacggtgggctatgagttgatgtgcgcgctggcgctacgcgtcccggttgtgacggtgtaacttgttgtaagccggatcggaggcaacgtcttctgggtgcaaaaaaatcatccatccggctggtcagcaactgtagttgttaatgtgacagagccattgcccatgatagtgtccattaaaaggatggacactatttccccggaacctgaactcaccgcacaggcgttctacataaaacgcttacgcttcattgttgactcgaactcgacttcagataaatcacgctttacccttgatggagcctgtacatagatttgtgtaattgcctgattttgatatgttcaattcaacatcaaatgaaggttaaattatggacgacaaacaattgcaggctcaggctgcgttcagcaaagcatcgcaaccggcgatagatgcttcattaaatttaagattcagcttcctcttcagccacccgtacgccaatcttcaacacttcattatcttctttctcggccaccgtccagatcatcccggcaaactctacctggtcaccgacaaccggtgccgcgcctaacaactgctggacaatttcacccagcgtttgctgcttatcacgatattctcgcccgtcttccaggccatatatcagcgcaacatcagcatatttggcgctggcttcgagaatgaagtcaccaaagaagcgttgatccagcgcgaccggcgggctctggctgaacagtttaccgagcgccggaagatcgcgttcccgaccaattacacacaacacatcgccttcgcgcagtcgggtgctgccggtaggatgaagcaactggttatcacgaaacagtgccgcaatacgcgtctcttttggcatatgcaaatcgcgcagtgccgcgcccacgcaccatttatcggcactcaattgataaacaaactgctcccacggattttccggatgaatatccaggccaacgcgactcaccggacgtcccactggcggaaccaccactttggcttttttagccgcccagctgagacttgttccctgcaagagcagactaaccagaaccacaaagaaggcgacattaaagaacagacgtgcattctccagccccgccatcatcgggaacacggccaggatgattggcaccgcgccgcgtaatcctacccagctgataaacacgcgctcacgcagattgaaaccgcggaaggggagcaatccagcaaatacgctaaggggacgggcgaagaatatcatccatgcggacaaaatgagcgccggaatggcaataggcagcagatcgcttgggttaaccaacagccccagcaccaggaacatggcgatttgcgccagccaggcgaggccgtcgaaattttgcaggatgccgtagcggttgcgaatagggcgattacccagcagaaaaccgcacagatacaccgccagaataccgctaccttccagcgcagtagttaaactgaaaatcagaataccgccacttaatgccagcaatggatataatccggcgggcagggcgatgcggttgatcatttgcagtagtaaataaccgccgccaagacctattacaatgcccagaccaaattgttgcagaatatcgacaatgaacatccagctaatattgctctcatgatgctggatcatcgcaattagggtaatcgtcagaaagaccgccattggatcattactgccggattcaatttccagcgtgctgccaacacgttcgttaagccccttaccacccagcagagaaaagaccgctgcagcatcggtagagccgacgatagcgccgattaataagccttcaatcaaatcaagattaaacagccacgccgccatcatgccggttaaaccagaggtgataagcacgcccagcgtcgccaggctcagtgccggtcctaacgccacacgaaaggaactggcctgagtgcgcatcccgccgtcgagcaaaataatcgccagtgccaggttacttaccatgtaggcgaaggggtaattatcaaacgggataccgccgacgccatcgactcctgccagcatgccgatcgccagaaaaataaccagaataggaatgccaagacgggaagaaaaactactaagtaatatactgctggtgacaaggatggatcctaagatgaaaaggctaattattgttgtggcatccaacggtcggttactcctgattacgctgtctcttatataaaccctaccatattagcggcagagacagcgttttacttagccctgaagcgtgatttttttacattttaagaacaggatgaccgctaatcgtcaactgagtgccttcccgggtgttattcagaatggcatgtgcgcccaacggcagcgtaaccgtgcgttgttcatgaccaaaatcgaggccggtaatgagtggaatgctcaggcgggaacgcaaaaacgcgtacacactctccaggttgtaacctgcgtcataatcattgggcgtgctgccgctaaagctaccgagaataatcgccttctgacgtggcaaaattcccgcatgatagagctgcaacagcatacgttcgacccggaaagggtgctcgttaatatcttccagcaccagaataccgttctcaatttttggcatccacggtgtaccgatcagactaatcagcatcgcaagattgcctccccacaacgtgccttcggcccgacatgtcgggccttccccttgccattcaatggtgaaggtttcattgcgtaacgccagccagaaatggtgctcggtaaaggcgttcagttcatccgcgccaaagtttgctaccagcatggggccgctaaaggtgatgacattgccatgcgccagaagaccgcactgaatggcggtaaaatcgctatgtccgcaaatgagcaacgggtcatgttgttggcgagccaccagtgcctgccagtcaatatctgccagtaaacgactggcaccgtaaccgccgcgtacagccagcacgatggtgttgggggtagtcagtctggcaagggaattgagatcttccagacgctctgtttccgtacccgcaaaacgctcacaacgacgggcaataacctcgacgttattgacttgatgccccgcgtcggtaaggcgctggataccacgcagcgcggcgtgctgtttaatgcagtaaccgcttggggcaattaagtgaaacagagacatggcaattccttgctgacaacagaaacgaaatgtatatcatgccgcttaggtgtgccgttgtcacctcaacggcgattccaggctataaggatagaagaagtgaaattgagatggtttgcctttttgattgtgttattagcgggttgtagtagtaagcatgactatacgaacccgccgtggaacgcgaaagttccggtgcaacgtgcgatgcagtggatgccaataagccagaaagccggtgcagcctggggcgtcgatccacaattgatcacggcgattatcgctatcgaaagcggtggtaatccgaacgcggtgagtaaaagcaatgccattggtttgatgcagttaaaagctagtacctccggacgtgatgtttatcgccgtatgggctggagtggtgagccgacgaccagcgagctgaaaaatccagagcgtaatattagtatgggggcggcttacctgaatattctggaaaccggcccgctggcaggcattgaagatccgaaggtactgcaatatgcgctggtggtgagttacgctaacggggcaggtgcgctgctacggactttcagcagtgatcggaaaaaggcgatcagcaaaatcaacgatttggatgctgacgagttcctcgaacacgtagcgcgaaatcaccctgcgccgcaggctccgcgctatatctacaaacttgagcaggcactggacgcgatgtaaatcagtcgcgcactttgtccgctttttcccgggcttctcgctcgagagagaaaataatccgctgtaattgccgctccaccgtcgggctgacgttaagaaaacggaagctcagacggggagtggtgatggtttcattcttgccatcaatcactttgcgctcgctgatggagattaactgggcgtcaaagtgaaaaacaccccattgccccatgttgacttcaatctgagcgaagcgcatgccttcttgtaattcggcaggctttgctgtttccagtaatgcgcccatgccgcctaagctcaaatcatacaggcggaaacgtaacgtactgttatccgccagtttggtctggcaaaaataaggcggatggagtggggcggagatgcggaaatatcggcgtcgttgtacaaaccataaggtgggaggcggtacggtaataaatgccggaagctgcaagtattcactctgctgtagttgttcaacagtaaactcgactttcgcaccctgagtttcggcggtaatggtaatgtgctgtgcctttagcacggcgatgttgtcttcggcttgactgccgaaatccagcaccagtttatccggggttattgccagtaatttgctgatcagctgcccgccattccaactgagacgcaaaggaattgcggctttgtgcaaatcgcgtaacacgcccaggacggctaacggattttgtttcaggaactgctcatggtaatgactcacgcggaaaaactcctgactgacaaactgtctttggtttatcggtcacagttaacaaaacttaatacaaatgcgtgaatattttttacatgttgttcttaaatcagccgacatacgcccagcatcgatcccgcccttgcctatacttagagcgttgatgtaagcatttcttgcgtccgattcatcgaaacgagggcctgaacatgggaattattgcctggattatttttgacctgatagccggcattatcgccaagctaatcatgccggggcgtgatggtggtggatttttcctgacctgtattctcgggatagtcggtgcggtggtcggcggctggctggcgaccatgtttggcattggcggctccatcagtggttttaatctgcacagcttcctggtggcggtggtgggagctattctcgttctgggcatattccgcctcctgcgaagagaataagattttcataaggcggatagcgatacagatgccgctatccgctttcacatcagaacgtatactcgacacctgctttacgggtgaaaaaaatcaatatagcacttcgatatccgataaagtcggttcccggtaacaacaacagaatccttttttaattattgtttcgttgtttttggtgtgattcagaaaataaatattttagacagtagccagagtggcgttaaaaatggggcggatagtgaggcggttttggctgcgcttattgaacatttagaattgatcaatccttctggcagattaagccaaaatacccgtagcgcaatgcttcagttacgcgaagaggaatggtctgaattctttttttggttgctaaattctctggagtgtctggattatgtgattattaatttaactccagaaagcaaaaaaacgttgatgagtgaacaccgtaacaatattcaggtagcaattgatgctttatatagccaacgtcggcgtaaaagcccgggtgatgaaagtgaaacacttacccgtagaaatgacgctatcttcggcaaccacgtatggcaaacatttgcgcaatacttcccgccaggacttgaaaaaccgtctgtgtaaaaaaaaccatagctatggtgttatctgccgacaacgccatccggagaagccgaatgacgttgtcggagtaagcgctggttaaggtgtgggttgtgcctctttggtactgggttgcgtcgttgcactcttaacggtcggacgcgtcgccggaacattgtcacacggttgctctttcgggcagatcaaatccagcattttcagcgtcacgccattggtccagccaaagccatcctgtaatggatattcgccaccgccgccccccgttccggtggtgctgacatcatatttttccaccagctttttctcccggtcataggtgtgctgaacattggtcaggaagtgccagctaatgtccatcgccacctctttttgcccgtagttttgtaatccttctgtcgcgacccactgtaacggtgcccagccatttggcgcatcccattgttgcccacttttcacgctcgtggtgttcaggccgccgggttgcagcagatgtgttttcgtcgccgtcgccattttgttggcgcgatctttcgctgccgcattgacgtacagcgggaacagggcggccgcggttaactgattgcgcactttatgacttttcaggtcgtaatcggcataccagccttgttgatcgttccacaggtatttttcgatccctttttgacgggcatttgccagcgtttcgtactggtttgccatcgcgttatctccggcagctttgctggcgcgggcgaggattttttccattttaaacatcaggctgttcagatcgaccggtacgatgctggtggtgcgtaaggtatttaactgctgcgggttgtccatccagcggctgctgaaatcccagccagacgcagcggcagagcgcaggtcgcggtaaatttcagtggcaggtcgattcggattgcttttggcggtggcaatatcttccacccaactctctggtcgtggcgtatcgcgatcgtcccagtagcggttgagaagggtaccatcctgaagtttgacaacgcgtttttcctgttgtccggcttgcaggttttcaacaccgtccatccagtaagcatattctttttgcatttgcggcaggtattgcttcaacgcggcatcgccttcatgctgcgccagtaactctaccatcagggcaaagaagggcggttggctgcggcttaaatagtaactgcggttgccgttgggaatatgaccgtaagtgtctatttcatgagcaaaattggccaccatatccgcgactttatcccagtgaccgctttcggcaagtcctaacatggtgaagtaactgtcccagtaatatacctcgcgaaagcgtccgcccggcacgacataaggttccggcagcggtaacagagaatcccatttttcggtgttttcggtagaacgcgttaataccggccaaagtccgtcaatatgttcgcgcagactctgcccctctggcggaacatatttctcgccttctttcggcagggtgaaattgacgttaacgaaatggcgcagatcaaatccgctctggttttgctgcatccgataatcagcaaggatcatcagcggatcgctgttcggcacggcatcggcaaaggttttttggtccggaaaaagtttggcgttttgcacatcattaaacagcggccctaataaaatatcaggcggctgtggtgttaccggtgtttcttctgcctgcacgcttagcgcagcgaaacacaaaaagatacaggctggaattaacgccattttttgcgggcgagaaggtgcgggggatttcatcaatcattctcctttggcgaaaccgaataaaacggtattcaagtatcagaaaaccttagttcaggatcgcactagctgcatgatcgaaatctcattctgcgaactgtcaggcattttagaaaagggaattaaagggataaataacggcgaaatagagtgatcaaataacgtctgtttattagccagccagcggcgttgggttcgtgattagcgaagaaaaatcatcataaattggtgaaaaatataacaggtagttaaaaaccattagtgctgagtaaattgccggatgacatcagaacgatgccatccgaacagtggcttaaccctgacggttgaaacgttgcgttttaacgtccagcgttagcgtttcttctggttgtatcgcatacagtttctcaccctgctggcaaatccagccaatccccagttcacgggcgattagggcgctgtgggataccggacttccggcgctaaggcagataccttttacaaccgccggatccagttgcagtactgtggaaggataaatgttctccgccagtagaatagttgggctgttaaactgcgggagttcttctttcgtttgggtcaggtggaccagggtgcgatgcagaagatcgtccacatcaatatagcgagcttgtagatattcatcatccagttgctggtattgctggctaagttctttaagaacttgctgccaggcatattctgccgtgcaatgttcatgctgaaggagttcgcttgccgccgccagcagttccggatcatctaacagtgtatggtgaccagaaaagattgcggcaatatcgtcaagcccgctggcttctgctttcgctgttaacgtcatcagatctaataacgtgaagtcaatagcctggcgtaatcgatcttgttcttcttccacggtcagggtactttttgcctgtaccgtacataaaactggttgataataaaaggctttaccgctaacaggcggaacgggacgcagagtaggtggagcgacttcctccgtttcaccaaagttatcttcagccagctgacggaaagcgatcagtgcctcttcagcttctggccctttcgcaatcaggcgcagcgtatcgttatagcgaacttgtagtaacgcaatctggttaatactctctggtgtgacgcatttgccgtttttttccagcaacatatcggcattaaatgtgcttaaggtataaaccagccgggaggccggacgtacatgcaggccgttacggttttttatgaccaccgccagagaacgggcttcttcatcgtacgcaggacatgtgtcagagatttcagtgtcggaggacggtaaacccagttgttcacgtttggcttccagcgcatgcatggcgtcaaagataactttgtcgatatccgccccgctggccgcgctgaccgttgctgccagtgtaccttcgaccaacggcgcagcacacaaacgtacttttgcggcgatctcgggagccagcaattccagcgcagtttcagcactcaataatgcgctacccatatccatcatgaccagcacatggtcggcatcagcaacagattcgatggcctccatcactttgacggcatcggtaccaatgggattttgtggatcgtcaattcccgcggcaatggcgattttacaactatcactcattaacatctgacgggctaattcaccgacaccttctcccagtcggctgctatgactaactatgaccaggtttaccatcaccaattccttactcttttgcggctaacgccaacatttgcatcataaacatcacgctggtcgcgccgggatcctggtgaccaatactgcgttcaccgagataactggcgcggcctttgcgggcttgcatcgtaatcgtactttgtgcagcggattcggcgatgctactggcagcttcgagcgccaccggaacagagagattttgctcgctggactgacgtaagctttccaccaccggcacccacacatcacacatggttttatcgccaggttcggctttcccgcgactgattacgccgtccgcgccatcgcggaacatctgataaagctcttccagtgtcaggctttgccgtgcctgggtcgcctgtgcggcgcggataaagaaggtaccgaacagcggaccactggcaccaccgacgctggaaagcagcgtcataccggtattcttgagaatgaaaccgatatctttatctgcgatagcagggagtttttccaccactttgctaaagcctcggttcatatttagcccgtggtcagcatcgccaatttcgcgatccagtccggtaagatactcgctctcggtgctgaaaatatcgccacaacgagtgagccagttaacaatttgagttctgctcagactcattgctttctccttatttaccccagttaagggccggggtgtggaccggggcgtcccagagtgccagcgtttcgtcatcaactttcagtaaggtgatactgaaaccggtcatatccagactggtgcagtacgcgccaattaaattacgttcgatagtcaatcccgcttgctggcaacgtgtggtcaggcggttatagacgccgtacagctcagaaagcggagttgcgccaagattgttaaccagcgcaatcacccgatcgccagactggagcggttgtttggtttgttgttcttcctgccaactgccttgttgataatcccagaaacgcaaagtgcgatggtaactgccatttaccagcagggtgtcgaacatttcatcgacggtttgatcaagggaagagaaggggcggcggtcaatacccggctcaccatgaatgccgacgccaaactccatctcattatccgccagggtaaaagaaggtttgcccgcggcaggaacggtacaggcaccgagagcgatacctatactgtggccttgattattcagcttacgccccagttccgcacaggcgtccagactgtcgccacgctccgccgctgcgcctacgagtttttcaattaatacggtgttggcaacgccgcgtcgcccggcagtataaagactgtcttttaccgcaacgtcgtcatcaatgaccacagtggtcacttttacgccgctatcgtgcagtaactcggtcgctgtttcaaagttaagaatatcgccggtgtaatttttgataatcaacagtacaccttcgccgccatcaacttgcatggcgcattcaaagattttatcgggcgtcggactggtgaaaatttcgcccggacaggccccgctaagcatcccctgaccgatataaccacagtgcatcggctcgtgtccgctgccgccaccgctcagcagggcgacttttcctgcaacaggggcatcagctcgggtgacatacaccggatcctgatgcagtgtcaggcttggatgcgctttcgccagtcctgccagttgttcgtccagtacgtcttgcacatcattgatcaattttttcattattttgctccagcaattacggtagggcatggatgatgttcaacgacacggcgaccactgactgccgatgaatccattgtgcatcaggcaagggaaaagaaaattagcccaaattatgtttcatagtgaaacatatgctttaatgaatgttccatattgaaacttttacgtgtattaatacttaaaattgcgagccggaacaccttttgtcataagggatgcgggatatgagtggcgcttttaacaacgatggtcggggcatatctcccttaattgcaacctcctgggagcgatgcaataagctgatgaaacgggagacatggaacgtaccacatcaggcccagggcgtgacatttgcttctatttatcggcgtaagaaagcgatgctgacgctcgggcaggctgcgctggaagatgcctgggaatatatggcaccgcgagagtgtgcgctgtttatcctcgatgaaaccgcctgcattctcagccgtaatggcgatccgcaaaccttgcagcagctaagtgcactgggattcaatgacggcacgtattgcgccgagggaattattggtacttgtgcgctaagcttagcggctatctctggtcaggccgtgaaaacgatggccgatcaacatttcaaacaggtactctggaactgggccttttgtgcaacgccgttgtttgacagcaagggccgattgacgggaacaatagcgctggcgtgtccggttgagcaaactaccgcagctgatttgccgttgacgttggcaatcgcccgcgaggtcggaaatttactgctgacggacagtttgctcgctgaaactaaccgtcatttaaatcaacttaatgccctgttagaaagtatggatgatggcgtgattagctgggacgagcagggtaatttgcaatttattaatgcccaggcggcgcgggtcttgcgccttgacgcgacggcaagtcagggacgggcaatcactgaactcttaacgttacccgccgtattgcaacaagcaataaaacaggcacatccgctcaaacacgtagaagcaacctttgaaagccagcaccagtttattgatgcggtgataacccttaaaccgataatagaaacgcagggaaccagctttattttgttgctccatcctgtggaacagatgcggcagttgatgaccagtcaattaggaaaagtcagccataccttcgctcatatgccacaggacgatccgcaaacccgccgcttgattcattttggtcgccaggcggcgcgcagtagctttcctgtcctgctttgtggagaagagggcgtgggcaaggcactgctaagtcaggcaattcataatgaaagcgagcgtgctgcaggtccttatatcgccgtcaattgtgagttatatggtgatgctgcgctggcggaagaatttattggtggcgatcgcacggacaatgaaaatggccgtctgagtcggctggaactggcacacggcggcacgctgtttcttgaaaagattgaatatctggcggtggagttacagtctgctttgcttcaggttatcaagcagggggttatcacgcgactggatgcgcggcgtttaataccaattgatgtcaaagtgattgcaacaacgaccgcggacctcgcaatgctggtggaacaaaatcgttttagtcgccagctgtattacgcgctgcatgcatttgaaattaccatcccgcctctgcgtatgcggcgtggcagcattccggcgctggtgaataacaaattacgcagtcttgaaaaacgcttctctacgcggctgaaaattgatgacgatgccctcgctcgcctggtttcttgtgcatggccaggcaacgattttgaactttacagcgtcatcgagaatcttgctctgagtagtgataacgggcgcattcgcgtcagtgatttgccggaacatctgtttaccgagcaggcgacagatgatgtcagcgccacccgcctttccaccagtctgagttttgcggaagttgaaaaagaggcaattattaacgcagcccaggtcacaggcggtcgcattcaggaaatgagcgctttacttgggatcggccgcactacgctgtggcggaaaatgaagcaacatggcattgatgcagggcagtttaagcgccgggtatgaaagacagaaacgatttctgatacatcagagtgatctgtatttcattccggcgcacgctaacaattttcagcatcgtttaagggcttgtctatcccgcacttaaaagctgaagcgatatcctccgttgacttgcttctgatcaaagaggttaccctgcgtgtaatccgcttcgagatagaatgtgtgctgtttgttatactgtgcactgactcccacgccgttattccagccattacctttgaaactgtacttctcccgggagttgttcaacagatattcggtatccccactaaactcgcggatagcgccagtcttcacatagacattcagctggctgttgcctgcggtgatgtcataccccagtatcatgctggcacgccccagcaggctttcgtagtgattcagatgtatattgaggccattactcgccttcatagtcatctcattctggtggctgtatgtaagctgggtttgcggctctatatagaacccataaccagtaggggacaggttgaacctctgcccggcttccagggagatgctcattccattcgcagtgccgttggcgttaacgccgttgttctgactgtccagtacgtggaaactatttttctggcggcttgcttttataacgagatcgctgtaaaaaccgttttgtgccatgtaactggcgtacattcccatgtagtcactacgtgcggtaccgtcgcctccgctatagtccgggcttgcatgtgtactgccaatatacagaccgacatacaacggcattacatcagagagacgtttatccccaccaaactggataccgctgtaacccatgtcaaagccgctcagtttgccactggcaaaggagtccaggcttcccccataactgcgcaaccagatattaccgtctttactctgatttcgcaggtcacccatccgttgcatcagcgtacggttttcaacatagttcaataagtaaccgacattgagataattgccgccagcatctgcggtcgtggtgggtttaggcgtgggagcgggttcaggcgtaggatcggggttgactatgggaggctgagcgggagctggtgtgggttcaggattaggagtcggttccggaactgtcccggaagcgtaaagctcccagttagtgccatttttacgcacatcgtacagatatccccccaactcaacctgagaagacgcgctgaagctggccgcgccgtcagtggtttttaccactgtcagaacttcatttcccgttgtggcctcgctgccctggttgcggatagccaatacgtgattaccagcactactcccgctgatattcaataaatcccctttattattaacgccattaccctcgccaacaacatcagcacgcataataaaggtactgttaccgctcaggttctctacgtttaatgtggcaaatgtgccggcagtactcccgtggctggcaaaatcgacagtactatggctcagcgccagcgtgtcgagattagaattacttgttacgttccagacgctgttattcattgcaacgtccagttttccgccattgacattatcgctgagggaggaacctgtccaaacgttcccagggtgcatatccagattgattagcccacctttggaaagaacgctaccgttgataagcatacgaccgctggcgttgatgcggctggcggcataaccatcgtcatgttgcgttgcgatggccatctggtcgggtgtactcatatcaatgaccagatcgctcgtgaggtcgatctggctgttggtcatggcataaattcccctggctcctgccgcgccggtgatagccaaactgtctccggttattctaccgccgctgagagcccacaaacccagcgccagactgccattacgatcaactgtaatatcggtattttgcatgttgacaacagccgttgccgtctgggcgctggcaccataagaaccgccggaaaagatgctgtttcgttgcgctgccgtgccagtaaaattgattatcgcgtcactaccactggtgacgaggccaccgccctgcgcggaagaaatatggctatctgcaccgatagtggttgtaccaccacgaacttcgacgccattggccgcggctccagttacatcaacagtgagtgcattcgcgctaacctggccaaagctccagaggccgtgagcattatcgccattggttttaatggtactgtttgttccgagatcgacaacagagtttttctgtacgtttatccccatggcgctgtagccctgaacatcgattgtcaggtctgtagccgtaaaacgcgcagcaccattggcgttattgccgttgagaccaccgatataaacacctgtacttccatcggtcgtgattttacttccgcttccaagatcgacactggtgccatagtcattgatggttaggcctataccgttgctgttttcaatggtgaattgagtggctgttagtgtactgctatgcccaataatgatgccgtcatcgttactcttaatggtgctgcctgtgcctaagtcagcatgggtatagtcaccaattaagttaatgccgatggcagaggtttgaccaacaacatctactgtgagtcggttagctgtcagggagctgtttttgccctgaataatgattccttttgcatatccagaggcgtcgttgacattgacggtgacatcattacccaggttgatattgccaggcgtgtttcctgctggggtcattacaccatagaggtttccacttggatcggcggtatctcctgtaattctgtcaccatcattaatagtaatattggtgccatattgacttcctgtatcagcagctatcagcaggggggaaaagataattgcattcaaaccaatagcgccaaattttatcagttgaatactggggctacggatttttaattcagcgagacgatctgctttggtattcccattgtgttgtttgatgcccataccactcctatatagtacccagactatgggtctatggattttgtcattttgtttaaatcaatgaataatatcctcttatcatcatgatatttgtatggtgcaatcatgatgagcttctcagagaataattctctattaccgggcaaaatcaggaacacaggaattaatatatatttaacatcccccttacaaaggtgagtttatatcgagttattccctaagttgtcgttacttattccaattcgttactataaatatggcaaaaatattacaacaaacagcggttaaaaaatttggtgaagattttttgtaataatcctaattagttatgggaatttcgcttgatgtatctgcataacaaaaacaatatgcgccatttttgcattactaataagaaaaagcaaaaaacatcgatattcatttttggtcaatgggttttctggcctatcgttgttattgtgctactggttatcattttcatcttgccagcatattggagcgtgatcaattttgatcagctgtgaagggggctgatgtgtagtgatacaaaaacttacgttatatcactgctaatgagatatccggcatctgaacacttatgtctttaattattctcgtggttcactataggcaataagcacaaaagtgtaggatgttacaagaatgattaggactcggtgaaatgaaaaatccacgcaattgcgtggattttatatacttttgcgctcttcatgagatttagcgaaacctcatgagacaataaattaattagacgttgaaaaggaagttcatcacatcgccatctttcacgatgtaatctttaccttctgcacgcattttgcctgcttctttcgcgccttgttcacctttgtaagtgatgaaatcttcaaagctgatggtttgtgcacggataaagcctttttcaaaatcagtatggattttgcccgctgcctgcggcgcggttgctccaaccggaatggtccatgcacgcacttctttcaccccagcggtgaagtaagtttgcaggttcagcagtttataaccggcacggatcacacggttcaggcccggctcttccagcccaagctcctgcataaactcgtcacgttcttcgtcgtccagttcggcaatgtctgcttcaacagcagcacaaaccggaaccacaacagaaccttctttcgccgcgatttcacgcacctggtcaagatatgggttgttttcaaaaccgtcttcgttgacgttggcgatgtacattgttggtttcagcgtcaggaagctcaggtaacgaatagccgctttctcttcagcgcttaaatccagcgcgcgcagcatacctgcattttccaactggggcaggcatttttccaggaccgccagctcagctttcgcgtctttatcgccacctttggctttcttctgtacgcgatgaatcgcacgttcgcaggtgtcgaggtctgccagcgccagttcggtgttgataacttcaatatcgtcagccgggttaactttgccggaaacgtgaatgatgttgtcattttcaaagcagcgaacaacgtgaccgatcgcttcggtttcacggatgttggtcaggaactggttacccagaccttcgcctttgcttgcgccttttaccagaccggcgatatcgacaaattccatggtcgtgggaagcgtacgctgcggttttacgatttcagccagttgatccaggcgaggatcaggcattggtacgacgcctgtgttcggctcaatggtgcagaatggaaagttggccgcttcaataccggctttggtcagcgcgttgaacagggtagatttcccgacgttgggcaaaccgacgataccgcatttgaatcccatgatttaaatcaccttaatatcttaataatcaacctgttattgctaacagattgcagaaatggaaataactttgcctattatacacggcactcggcaaaaatgccgcagacaacgacttattgcgctttaaaggcgtgcaatcggttcgttgctttggtcaagccatctgtaaaccacatttcagtacaacgcgccgcttcgtcaatggcttcatcaattaacttctgttcactaacaggcggtttgcctaacacaaaaccgacaactttatttttatcgcccggatgaccgattccgatgcgtaaacggtgaaagttagggttattacccaatttactgatgatgtctttcagtccattgtgaccaccatggccaccgcccaatttaaatttggcgacgccaggaggcagatccagttcgtcgtgggccaccagaatttcgtccggattaatgcggaaaaaactggccatcgccgcaacggctttgccgctgagattcataaatgtagtcgggactaacaggcggacatcttcgcctccaagagtgactcggctagtataaccaaagaatttagcctcttcgcgcagcggagcgcgcaaacgctctgccagtaagtcaacgaaccaggtaccagcattatgtcgcgttgcggcgtattcagcaccggggttcgccaggccgacaatcaatttaatcgtcacgtttttttgtcctgagtgtgtacataactggcgcgtagtttactggttgcggccccgcttgacaaaaaactgcgtatcaaatgcagataacgtaataattgcctgagtggactattagaaagtcaaggtgttcaggcgtttatttgtaaagttttgttgaaataagggttgtaattgtgatcacgcccgcacataacccactgggtgttgtctatactttacacataaggaagaggggtattccctgttacaacccagaaagttccggaggtgacatatgaaacgcaaaaacgctagcttactcggtaacgtgctcatggggttgggtctggtggtaatggtggtcggcgtggggtatagtatcctcaaccagttaccacagtttaatatgccccagtatttcgcacatggtgcagtgctaagtattttcgtcggtgccattctctggctggcgggtgcccgtgttggcgggcatgaacaggtgtgcgaccgttactggtgggttcgccactatgacaaacgttgccgccgtagcgataatcgccgtcatagctaacaaataatgcagtttgctgaccagtcagtttgcgctgactggtcaatctcgtacttataaatccgccatcgccgcgcgacgattcgggaagaacgccaggcgtcccgggatcggttgaatgccagcgcgagccatagtgcgcagtggctggaattccacgttgcacacgcgcagttcacatccctcgggcagacgcttcacaaaacgctggaacgcatcaagaccaccagcatcaagtaccggaacggcatcccacttcagaatcacaatccgtttgccttcaagacgactctccaggtccgtgaataagccttcagcagcagcaaaaaacagcgggccaataacgcgcagaaccaggacatcgtctggaacatctacgactaccggtgccaggcgagtcatacgtgcgatacgacgcataaacagcaggcttgccagcacgatccccacgctgatggcaataaccatatcaaacaacacggtcaggctcatgcacagcagcatgacgatgatgtcatctttcggcgcatgacgcagcaagtcgaccactttgtgcgcttcactcatgttccacgccaccatcaacagcagggctgccatggcggaaagcggcagccaggagagcagcggtgccagtaccagcagggcaagaataaccagaatagagtggatcaccgcgctgataggggacgttgccccggcacggacgttagcggcagaacgcgcgatggcagctgtagcggtaataccaccaaagaacggagcgataatattccccagtccctgtccaaccagttcgctgttcgccttgtgtttcgtcccggtcataccatccagcaccacggcgcagagcagagattcgattgcgccgagcattgccatactgaatgccgcaggcagcagtgtgcgaatagaatcccaggttagcgtgaattcactattaggcagatcccacggcagcaccagttgcggcagcagttgcggaataccgttaccctgagaaccatcggccaggacgtagtggaattggctaccgatggtagcaacatgtccgccgagcaggttaacaatccccatcaccgcgcaaccagccagcaaggccggaaggtgaccgggtaaacgaatgcccagacgcggccaaaaaacaagaatacctagcgtcacaatgccaatggcagcatcacccacattaatggtcggcagcgccataaataatgcgccgactttttgtagataatgttccgggacatgggccatttgcagaccgagaaaatctttaatctgcatggtaccgatggtgatcccgataccgctggtgaaacctaaggtgacggaaaccggaatatactcaatcaggcgaccaaagcgtgccagacccatcagaatcaaaaagatcccgctcagcaaggtcgcaaccagcagtcctgccagtccaaactgttggctcacgggatagagaattaccacaaatgccgcagtcggaccggaaacgctaaagcgactcccacccgtcagagcaatgacaatccccgcaacagctgcggtatataaaccgtactggggtgccacaccactaccaatagccaacgccatcgccagcgggatagcaataatcccgacggttatcccggcaatcaggtcacgggtaaaccgtgcggcagtatatttttctttccagcaagcgtcgatcagagcgcggaaaggcatcacatgactggaaaatattttgttcacaataatgtttcatccgtgagcgcatcatctgtcaactaaatggcaggtgaaggaggcataggtcatacaaatggatattacagacaaaaaaacccgccgcagcgggtctttgagccgggttcgattagtgttcgaacatggcagagatgctttcttcgttgctgatacgacgaatcgcttcggccagcataccactcagggtcagagtacgcacgttcggcagacttttgatttcatcgctcagcggaatggtatcgcagacaacgacttcatcaattacagagttacgcaggttgttcgccgcgttgccagagaagatcgggtgagtcgcgtacgcaaatacacgtttagcaccacgttctttcagagcttcagcagctttacacagcgtaccgccagtgtcgatcatatcatcgaccagtacgcagtcacgacctgcaacgtcaccgatgatatgcatcacctgactaacgttcgcacgcggacgacgtttgtcgatgattgccatatcggtatcgttcagcagcttagcgatagcgcgggcacgcacaacgccgccgatgtccggagaaaccacaattgggttatccagattcagctgcagcatgtcttccagcaggatcgggctaccaaatacgttatcaaccggaacgtcgaagaaaccctgaatctgttcagcgtgcagatccactgtcagcacacggtcaacaccgacgctggagaggaagtctgcaaccactttcgcagtgattggtacacgagcggaacggacgcgacggtcctggcgcgcatagccaaagtaggggataacagcggtgatacgacctgcggaagcacgacgcagggcatcaaccataacgactaattccatcaggttgtcgttagtaggggcacaagtggactggatgatgaaaatatcaccaccgcgtacattttcattaatttgtacgctgacttcgccatcgctaaagcgacctacagcggcgtcgccgagactagtgtacaggcggttggcaatacgttgtgctagttccggggtggcgttaccagcaaaaagcttcatatcaggcacgagaagaacctcaggcatgcgtccattggtggaaagaatctgccgaaaactgtgcgggccaggcatgatcctttccaggcggtgtattaaagagcgcgatgcaacgtctggaacaaggtgacgttgtcaccgaaactcagcttgcccggcttaaagcatggctctgtgcaatggggaaagattagcgcctttcgccacaaagccattgagccattccggggcttgctctagcacctggcgggcttcagactctgtatcaaattcagcaaagacacaggcccctgtcccagtcaggcggctcggggcgtattctaacagccaggaaagcaccgcatcaacctcgcgaaaacgttttcttgcgataacctcgcaatcattgctgaattcacattttagcaacgtttctatactcctttttggcgtattgcgcgggagttcaggatctttaaaaatcaccggagtcggaatacttacaccagggtgcgccaccagataccacttctctggcggatccaccggcgttagtatttcaccaacgccttcggcaaacgcggcatgcccccgaacaaagacaggaacatctgcgcccagcgtcagccccatttccgccagctcatccatgcttagcccgcattgccagagatgatttaatgccaccaggaccgtcgcggcattggaactaccaccgccgagaccgccgcccatcggcaaacgcttgtcaatgctgatattcgcaccgcttcccgtcggaagacgcccgctgtctgccgcagttttcatcaacaatcgcgctgcgcgaacgatcaggttatcttcatgttccacgccttcaacgggcgttaacagacgaatatccccatcgtcacgaagctcaatgctgatggtgtcgccgtaatcaagaaactgaaacagcgtttgcagcgtgtggtaaccatccgcacgctgaccggtaatgtataaaaacagattaagttttgccggagagggccactgtgtccgcattatttcactatccagttatccatttttaacttgatgcgttgaccaccgtcggtgagttccatattggctggcatcgcaggttgcgttttggtgtcataaccaccataaacaaccttccagtttttgccattctggctgtaggtaatttcgctcaggcggtactggtcgtccagtttgtagtcggttgcatcacccggtaaacctaaaatccactggcgcaagctgttgagcggaattggcattccggtcaatttgccaatcatctcttcggcgtcatcggcggtataacgctgacctttattgtcgactaactgcacgttacccggttgagcattcagctccagttccgtgctgcccaatgggttagtgagcagcagacggtagcgatcctggccggtttgctgccagaaaaagcgggcgtacactttttgttggtcagaaatataagcgaacgcgccgcgagtctgatactgattaagattgcgcacgtcttgctgatgctgacgccattgtgggctatccgggcttttgccaggacctttgggcgtggtaacggaacaggcagtgagcacaagagcagccagcggtagcaggcggataagacgaaaatcgggcaggggcatagtgatgacaagtccttgagatacgttgcagttataacccttaatgctagcgttaccgtccgctatcgtctatgttcaagttgtcttaattgccagaatctaacggctttcggcaattactccaaaagggggcgctctcttttattgatcttacgcatcctgtatgatgcaagcagactaaccctatcaacgttggtattatttcccgcagacatgacccttttagcactcggtatcaaccataaaacggcacctgtaagcctgcgagaacgtgtaagctttagcccggataagctcgatcaggcgcttgacagcctgcttgcgcagccgatggtgcagggcggcgtggtgctgagcacgtgcaaccgcacggaactttatcttagcgttgaagagcaggacaacctgcaagaggcgttaatccgctggctttgcgattatcacaatcttaatgaagaagatctgcgtaaaagcctctactggcatcaggataacgacgcggttagccatttaatgcgtgttgccagcggcctggatagtctggttctgggggagccgcagatcctcggtcaggttaaaaaagcgtttgccgatagccaaaaaggtcatatgaaggccagcgaactggaacgcatgttccagaaatctttctctgtcgcgaaacgcgttcgcactgaaacagatatcggtgccagcgctgtgtctgtcgcttttgcggcttgtacgctggcgcggcagatctttgaaagcctctctacggtcacagtgttgctggtaggcgcgggcgaaactatcgagctggtggcgcgtcatctgcgcgaacacaaagtacagaagatgattatcgccaaccgcactcgcgaacgtgcccaaattctggcagatgaagtcggcgcggaagtgattgccctgagtgatatcgacgaacgtctgcgcgaagccgatatcatcatcagttccaccgccagcccgttaccgattatcgggaaaggcatggtggagcgcgcattaaaaagccgtcgcaaccaaccaatgctgttggtggatattgccgttccgcgcgatgttgagccggaagttggcaaactggcgaatgcttatctttatagcgttgatgatctgcaaagcatcattagccacaacctggcgcagcgtaaagccgcagcggttgaggcggaaactattgtcgctcaggaaaccagcgaatttatggcgtggctgcgagcacaaagcgccagcgaaaccattcgcgagtatcgcagccaggcagagcaagttcgcgatgagttaaccgccaaagcgttagcggcccttgagcagggcggcgacgcgcaagccattatgcaggatctggcatggaaactgactaaccgcttgatccatgcgccaacgaaaagtcttcaacaggccgcccgtgacggggataacgaacgcctgaatattctgcgcgacagcctcgggctggagtaacagtacatcattttctttttttacagggtggaggaggaataatggaatatcaacactggttacgtgaagcaataagccaacttcaggcgagcgaaagcccgcggcgtgatgctgaaatcctgctggagcatgttaccggcagagggcgtacttttattctcgcctttggtgaaacgcagctgactgacgaacaatgtcagcaacttgatgcgctactgacacgtcgtcgcgatggtgaacccattgctcatttaaccggggtgcgagaattctggagcttgccgttatttgttagcccagcgaccttaattccgcgcccggatacggagtgtctggtggagcaggcactggcgcggttgcctgaacaaccttgccgtattctcgatctcgggacgggtaccggggcgattgcgcttgcgctggctagcgagcgcccggactgcgaaattatcgctgtagatcgtatgcctgatgctgtctccctggcacaacgtaatgcccagcatctggcgatcaaaaatatccacattctgcaaagcgactggtttagcgcgctagccgggcagcagtttgcgatgattgtcagcaatccgccgtatattgacgagcaggaccctcatcttcaacaaggcgatgtccgctttgagccgctcactgcgctggttgcggcagacagtggaatggcagacatcgtgcatatcatcgaacagagccgtaacgcgctggtatccggcggctttctgcttctggaacatggctggcagcagggcgaagcggtgcgacaagcatttatcctcgcggggtatcatgacgtcgaaacctgccgtgactatggtgataacgagcgcgtaacgctcggccgctattatcaatgacaagtttttctacactgcttagtgctcatcttattagtatcgcgctttctgttgggctattaaccttacgtttctggctacgttatcagaagcatccacaggcatttgctcgctggacgcgcattgtgccgccggttgtcgatacgctgttactgttaagcggcattgcgttgatggctaaagcgcacatcctgccattttccgggcaggcacagtggctgactgaaaagctgtttggagttatcatttatatcgttttgggttttattgcactcgattatcgtcgtatgcacagtcagcaggcgcgcattattgccttcccgctggcgttggtggtgctgtacatcatcattaaactcgccaccacaaaagtaccgttactggggtaagtcatgagaagcttagctgatttcgaatttaataaagcgccattgtgcgaaggcatgatcctggcttgcgaagcaatccgccgcgattttcccagccaagatgtttacgacgaactggagcgtctcgttagtctggcgaaggaagaaatcagccagcttctgcctttagaagagcagttggaaaaactgatcgcgctgttttacggcgactggggatttaaagccagtcgcggtgtttatcgtctttccgatgcattatggctggaccaggtgttaaagaatcgacagggcagtgcggtaagtttaggtgcggttttattatgggtcgcgaatcgtctcgatttgccgctgctgccggtgattttccctacgcagctgatattgcgcattgaatgtccggatggcgaaatttggctgattaatccttttaacggtgaaagcttaagcgaacatatgctggacgtatggttaaagggaaatatcagcccgagcgcggaactgttttatgaagaccttgatgaagctgataacattgaggtaatccgcaaattgctggatacactcaaagccagcttgatggaagaaaatcagatggagctggcgttacgcaccagcgaagctttattacaattcaaccctgaagatccctatgaaattcgcgatcgcgggttgatttatgcgcaactggattgcgaacacgttgcgttgaacgatttaagttatttcgttgaacagtgtccggaagacccgatcagcgaaatgatccgtgcgcaaataaataacatcgcgcataaacatattgtgctgcattaattaatcgacattttactcaagattaaggcgatcctatgaaacaaaaagtggttagcattggcgacatcaacgtagcaaatgacctgccgttcgtactgtttggcggtatgaacgtgttggaatctcgcgatctggcgatgcgcatttgcgagcactacgtaactgtgacccagaaactgggtatcccttacgtgttcaaagcctcttttgacaaagccaaccgctcctccatccactcttatcgtggaccgggcctggaagaagggatgaaaatcttccaggagttgaagcagacttttggcgtgaaaattatcaccgacgttcacgaaccaagtcaggcacagcccgttgctgatgtcgtggatgtgattcagttgccggcgtttcttgctcgccagactgacctggttgaagccatggcgaaaaccggtgcggtaattaacgtcaagaaaccacagtttgtcagcccgggacagatgggtaatatcgttgataaattcaaagaaggcggcaacgaaaaagtgattctttgcgatcgcggtgctaacttcggctatgacaacctggttgtcgatatgctgggcttcagcattatgaagaaagtgtctggtaacagcccggtgattttcgacgtgacccacgcactgcaatgccgcgatccgtttggcgcagcttccggtggtcgtcgtgctcaggtggctgagctggcacgagccggtatggcggtaggtctggcggggctgtttattgaagcgcatccggatccggaacatgcgaaatgtgatggtccatccgcgctgccgctggctaaactggaaccgttcctcaagcagatgaaagcgattgatgatctggtgaaaggtttcgaagaactggataccagcaagtaatcttttttgcttgaaaaataaagtattagcgttctgcgttaagacttttttcatgggtgccggatacaaaaaaggccgcaggctgttacccctgcggccggtttcgggcgcatattgccatcacggcagcctgacgcccgttttcaccttacttccggttacgccaccagctgacaatcgctgcggtaataattcccgccaggatcggtgctgccaggtcgtgccagaaaatcatggcaaactgcgcgagcgtcatatagccgccttgttgtaatgacaacattttgcggctattcttgaattgttctggttcaagattagcccccgttctgttgtcaggttgtacctctcaacgtgcgggggttttctctttccagcaaccaatgccaccagggataaagcccccgcaacattgcgcctcaccggataacgccggcttggtgtggatactacgactcaattcatcttcacttcatccctgaaatgtttgcaatgaagagtgcattccggtttttcaacagctgttacagtcatttcatgagtgctctggatgaggcttccagctcgggttgccaatatttacttgtggaagtgataaagacaaaaatggccgcaggctgttacccctgcggccggtttcgggcgcatattgccatcacggcagcctgacgcccgttttcaccttacttccggttacgccaccagccgacaatcgctgcggtaataattcccgccaggatcggtgccgccaggtcgtgccagaaagtcatggcaaactgcgcgagcgtcatatagccgccttgttgtaatgacaacattttgcggctattcttgaagtgtctggtttcaagattagcccccgttctgttgtcaggttttacctctcaacgtgcgggggttttctctttccagcaaccaatgccaccagggataaagcccccgcaacattgcgcctcaccggataattccggcttggtgtggatactacgtctcaattcatcttcacttcatccctgaaatgtttgcaataaagagtacattccggcttttcaacagctgttgcagtcgtttcatgagtgctctggatgatgcttccagctcgggttgccaatatttacttgtggaagagataaagacaaaaatggccgcaggctgttacccctgcggccggtttcgggcgcatattgccatcacggcagcctgacgcccgttttcaccttacttccggttacgccaccagctgacaatcgctgcggtaataattcccgccaggatcggtgctgccaggtcgtgccagaaaatcatggcaaactgcgcgagcgtcatatagccgccttgttgtaatgacaacattttgcggctattcttgaagtgtctggtttcaagattagcccccgttttgttgtcaggttttacctctcaacgtgcgggggttttctctttccagcaaccaatgccaccagggataaagccccgcaacattgcgcctcaccggataacgccggcttggtgtggatactacgtcgcaattcatcttcacttcatccctgaaatgtttgcaatgaagagtacattccggcttttcaacagctgttgcagtggtttcgtgcagggtgtggtacaggctcgcaattctgattaacgacctgtccaggtagtatgaagaaatacaataagcaggaatttatattatctcccccgattaccgtcatcggaggagatataactgtcaggcaaatatcgtcatcaaataggcggcaaacagtgccagatgcgctgcgccattgagcatgttagtacgtccggtggagaaggagatatggcacagcactaaagaggccaccatcaccaccatttctggcgcaccaagtgcaaactgcaattcgttacccgtcataaaggcaattagcgtgacgacaggtacggtaaggctaatggttgctaacacactaccaaagaacagattcatcgcgcgctgaacctggttgttcaacactgcttttaatgcacctaaaccttccgggctcagaatcaacagtgccaccaggaagccagtaaaggcgacaggggcattcatgctgtcgagcaatgtctccaggctgctggcgttcattttggtcaccgcaataacggcaatcagatggataatcaaccagatagcatgccacaggctgctatgggcagacggtttaccgtgatgcgggtcgtcatcatcactgtcatcttcgtgctcgtagacaaacaaactttgatgcgttttggtctggatcagcaaaaatacgccatacattgccgcagaaattaatgctaccagtaacgcctgaccggtactaaaattcgccgcaggcagagccattggaaataccagtacgattatcgccagggggaacagcgcaattaaatactgcttgataccaaacagattcatatattgggtggcaaacttacgaccgcccaacaataaactaaagccaaccagcccaccggtaacaatcataatgatactatagagcgtatcacgcattagcgttggcgcggcgtcgccggttgccattaaagcactaatcaaactgacttcaagaataaccacactaaggctaagaataaggctaccgtaaggttctcccaggcgatgggctaatacgtccgcatgacggacaacactaaaggcgctacttaaaataccaataagcgcaagaagattgatggcaatgaccactggtagtgtctggctgcttccccacaggaacagcactaccagcgccagaaccgggaaaataaggctagtctccttgtggcgggtttttaccgcctcttgagcattactcattatggttatccctttgcagatgaatttatcgaaaatgtaaaaaataggtaggaaaaataacagaaagtgtctggatatcggtaacattttacgaatttttaccccgctgtcgattttttactcattggggcataaaaataagtattacgtttagacaatgtttgttttagcgtctcttaagaagagtctgacctgaaaattcttatgttttggcaagagtagatattgttgaccacacttaatgttcaactttgtaaaaggagtcaacgatgccgtataaaacgaaaagcgatctgccggaaagcgtaaagcacgttctaccgtctcatgcccaggatatctataaagaagcgttcaacagcgcatgggatcaatataaagataaagaagatcggcgtgatgacgccagtcgcgaagaaaccgcgcataaagtggcctgggctgctgtgaagcatgaatatgccaaaggggatgatgataaatggcataaaaaaagctaaaaccggtcgcttagttaaagctattcgtgcggtgttgccttgcaagtggtccgtggattgcatattgtcccgttagtggtttcaaaatgagcagtaaaaatgtccggaagacaccaaaaagttgtcgcagggaagtatgcagtggcggaagtgtaaggtgataacgcgtgatttcttgatgaatgccgattgtaaaacggcatttggtgccattgaagaaagtctcttatggagtgcagaacaacgggcggctagcctggcggcgacgctggcttgtcgacctgatgagggaccggtgtggatcttcggctatggaagcttgatgtggaatccggcactggagtttaccgaaagctgcaccggtacactggttggatggcatcgcgcattttgcctgcgcctgaccgccgggcgcgggactgcgcaccagccgggacggatgcttgcactgaaagagggcggacgcaccacaggcgtcgcctatcgactgccagaagagacgctggagcaggaactaaccctgttgtggaagcgagagatgattaccggctgttatctgccaacctggtgtcagcttgatcttgatgatggacgcacagtaaacgccattgtgtttattatggacccgcgacatccagaatatgaatctgatactcgcgctcaggtcatcgcgccgttgattgcggcggcgagcggtccgctgggaaccaacgcacaatacctgtttagtctggaacaggagcttatcaaactgggaatgcaggacgatgggctgaatgatttgctggtaagcgtaaaaaaactgctggcggagaattttccggatggtgtgttacgtccgggattcgcctgagtaaacttcccgcatagtggggcgtcagacgccccctcaaacattaaaatgtgagcactttatcggcactcagcgtccattgcgccagttccacaagagtaccgatttccaccccatcaatcagaggaagtgtactaatcccgcgcccgtcggtacaggttttgcacaatttcaccggtacattctgagcggtaaggatctccagcatttgctgaatgttgtagccttcccctggtttttgcccgcgcaacccggctgtgaccgcatcagacatgaggaacagacgcagatccagattgctctcctgctctcgtaacgcaatggccagccgcaagctgttaaacaaggattcgctcccgtaaggtgcgccattggcaacgatcacgattttttgcattatttactcctgtattcagggaattagacactcatcttctatcttactgcttctgcagcgtctgaccaatcggtcacatttttaaggattttcctgaaagcgcgagaaaatacgacaaaagttgccagtaatcgttattctttaaggctatggtttttcattattaccggaagttaccgacgttttgagccgtttcgttcctcgcattatcccgttttatttactcttgcttgtagcaggcggtacagctaacgcacaatctaccttcgagcaaaaagcggcaaatccctttgataataacaatgatggtctgccggatttaggcatggctcccgaaaatcatgatggggaaaaacactttgctgaaattgtgaaagatttcggcgaaaccagtatgaatgataacgggctggatactggcgagcaggcaaaagctttcgcattgggaaaagtccgcgacgcgcttagtcaacaggttaatcagcacgtagagtcctggctaagtccgtggggaaatgccagtgttgacgtcaaagtggataacgaaggacatttcaccggcagtcgtggaagctggtttgtgccgttacaagataatgatcgttatctcacctggagccagcttggtcttactcagcaggataatgggttggtgagcaatgtgggcgttgggcaacgctgggcgcgcggcaactggctggtgggttataacactttttatgacaacttgctggacgaaaatcttcagcgagcgggctttggtgccgaagcgtggggcgaatatttgcgattaagcacaaacttttatcagccgtttgctgcatggcatgaacagacagccacgcaggaacaacggatggcgcgcgggtacgacctgacagctcggatgcgcatgccgttctatcaacacctcaataccagtgtcagcctagaacagtattttggtgatcgtgttgatttgtttaactctggtacgggttatcacaatcccgtcgcgttgagtctgggattaaattacacccctgtgccattagtcactgtgacggcccagcataaacagggtgaaagtggcgaaaatcaaaataacctcgggctgaatcttaattaccgctttggtgtaccgctcaaaaaacaactttctgcgggcgaggttgccgaaagtcagagcttacgtggtagtcgctatgacaatccgcagcgaaataatctaccgactcttgagtaccgacagcgaaaaacgttaacggtgtttctggcgacaccgccgtgggatctaaaacctggcgaaacagtgccgctgaaattacaaatccgcagtcgttacggtattcggcaactgatttggcagggcgatacgcagatattaagtttgacgccgggcgcacaagccaacagcgcggagggctggacgctgatcatgcctgactggcagaacggggaaggggcaagcaatcactggcgattgtctgtggtggtggaagataaccaggggcagcgtgtctcctccaatgagatcacgctaacgcttgtcgaaccgttcgatgcattgagtaacgacgaactgcgctgggaaccgtaatcagaaaatgcgctcctgatgcacccataccgctgcttccacgcgagacttgagcttcattttcttcagcatgtgcttgacgtgcacttttactgtgctttcggtgatatccaggcggcgggcaatcatcttgttcggcaaaccctgggcaatcagcttgagaatatcgcgctcgcgtggggttaactggttaacatcgcgctcagtagtggcacggttagcgcgcaagctggcggccagaacaggcgttaatgcttcgcttaataccatttcgccagcagctgcctgatgcaatgctttcagcagatcttccggttccatatcttttaacagatagccatccgcgccgcgtttcagtgcggtgaccacatcttcttcatggttagagacgctgaataccacaatgcgcccactgagggacttttcgcgcagtttatccagcgtttccagaccgttcatgccgggcatattgagatctaacaggatcagatcgggatcaagagactccgccagttcaataccctgttcgccattactcgcttcgccaaccacggtgatatctggtgccatactgataagctgttttacgccagttcgcagcatcgggtgatcgtcaatcagcaggatagtagccggttcctgattactcatgggtatctccttggacgtctgtgaaagttttttcgggaataaaggtgaccaccacttcggtgccaccactttcacgacggcggacgcggcaatcgcctcgtaaactttgcgcacgatcgcgcattattatcatgccgtagtgattgctgcggatggcattttcaggcacgccgcagccgttatcctggacggtcagtttgacctgattatcgttttgcgccaccgtcaccacgacttcactcgcttggctatgtttgagggcgttacttaatgcctcacgggcaatttgcaacaagtggattgcctgatggctaggcaccaggcgaggcggcaattgataatccagcttcaccgggaagccaaatttggcgctgtactcttcgcaactcgcctccagcgccggacgtaatccaggctcggtgagctgcaagcggaatgtggtgagcaattcacgcaactgcgcccaggatgcattcagttcgttacggatctgacttaacagttcgcggctgctttctggcagcgcatcgccctgcatctgtaaacaactcacctgcatcttcatgcaagagagagattgggcaatagaatcatgcagttcgcgcgcaatggtggcacgctcttccatcacgatcaactgttgctgacgttcctgatggcgatccagcgccagcgtggcggtgagttgttcaaccagggtatccaccagttgttgttgatcatggctaagatgacgcccctgcggcagggtcgccagcaaaataccgtactgcgtatgagagtcagccagccgccacttcagggtcgtgccgcgatcaccaacgggtaatacgccgcgcgggcagagctggcagcctttatcatcacaagtcatatctggctggcaggtaaactcctgatgattctcttcatcatcagtgtcatacacccgcaattcgatatcacgtagcagggttaaattctgtaagccgttgagtacaggactcaggcgttcacacagcggggcgcgggaatgcaaacggcggttagcctgccataaaaaagagaggatctgatttttatgctccagcccggcggttttctcctgaacccgctgctcaagtacggcataactttcggccagttctgcagacatattgttcaacgcagttccaagcatcgccatttcgttgcgcccgctgatgtttgcgcgttgggtaaaatcgcgatgactgacggcactcgccattgccagcagttgccgccacggttgtagcagtcgcgcccgcaaccagataatagtgaacaccagtaaaagtgccataaataccgccattacccgatggaccagtaccactgtctcgatgcgcatttccgtggtgcggtcaaaaccagataccagttgatcaagcccggcaacaaactggctgacatccgcactcaccgtttctcggttttgtgcacgcatcagcgcagggatcagttcattacgccagtaatcttgtaaaccctgtaattgcgccagttgtccgtctcgttctgctgctcgagtcaactcggcgctaaatgccgtttgttccatctctttaattaagggcttgtctttctcgcttaatggcactgccgccaacagacggtaactttgcatgcgcaggcttcccgctttgttgatcgcatgggcgctgccctgaacgccttgcaccagccagccagaaaccgccatccctgccagtccaatagcagtagaaagcaacacaataagcgcaacctgattaaccagggtgagcggagagagacaacgtttaagcatgtaaacctcttccttcaggctttaaatgagcaataaccttaatgaatgtgacgatacattctggaatggcagtattctcggctattggctgaagtatacccatacccggaaagagttactccttatttgccgtgtggttagtcgctttacatcggtaagggtagggattttacagcaccgtgaaaaatctcataatttttatgaagtcactgtactcactatgggtaatgataaatatcaatgatagataaagttatcttatcgtttgatttacatcaaattgcctttagctacagacactaaggtggcagacatcgaaacgagtatcagaggtgtctatgagtcacagttccgcccccgaaagggctactggagctgtcattacagattggcgaccggaagatcctgcgttctggcaacaacgcggtcaacgtattgccagccgcaacctgtggatttccgttccctgtctgctgctggcgttttgcgtatggatgttgttcagcgctgttgcggtgaacctaccgaaagtcggctttaattttacgaccgatcagctatttatgttgactgcgctgcctagcgtttctggcgcgttattacgtgttccatactcctttatggttcctatcttcggtggtcgtcgctggacggcgttcagcaccggtattctgattattccttgcgtctggctgggttttgccgtgcaggatacctccacgccttatagcgtcttcatcatcatctctctgctatgcggctttgctggcgcgaacttcgcatccagtatggcaaacatcagcttcttctttccgaaacagaagcagggtggcgcgctgggtctgaatggtggtctgggaaacatgggcgtcagcgtcatgcagttggttgctccgctggtggtaagtctgagcattttcgcagtatttggtagccagggcgtcaaacagccggatgggactgagctgtatctggcgaatgcgtcctggatatgggtgccgttccttgccatcttcaccattgcggcgtggtttggcatgaacgatcttgctaccagcaaagcctccatcaaggagcagttgccggtactcaaacggggtcatctgtggattatgagcctgctgtatctggcaaccttcggctccttcatcggcttctccgcgggctttgcaatgctgagtaaaacgcagttcccggatgttcagattctgcaatacgctttcttcgggccgtttattggtgcgctggcgcgttctgcaggtggtgcattatctgaccgtctgggcggaactcgtgtcacgctggtgaactttattctgatggcgattttcagcggcctgctgttcctgaccttaccgactgacgggcagggcggaagcttcatggcgttcttcgcggtcttcctggcgctgttcctgacagctgggctgggtagtggttccactttccagatgattagtgtgatcttccgtaaactgacaatggatcgcgtgaaagcagaagggggttctgacgaacgtgcgatgcgtgaagcggcaaccgacacggcggcggcgctgggtttcatctctgcgattggcgcgattggtggcttctttatcccgaaagcgtttggtagcagcctggcattaacgggtagcccagtcggcgcaatgaaggtatttttgattttctatatcgcctgcgtagtgattacctgggcggtatatggtcggcattctaaaaaataaaccgttactcgtcatacttcgggttacatgtgctgcggctgcgttcattcaccccagtcacttactttagtaagctcctgggattcattcacttgccgccttcctgtaaaccgaattatatagagtaaaatatttgattatcctttgcgcggcatgatgtcgcgctttttttatgcgtcatttagttacaacatactaatgttatatggtttatttcgccggatttcattaagagccattaatatgttacccatggggaatactccttaatacccatctgcataaaaatcttaatagtttaaataactacaggtataaaacgtcttaatttacagtctgttatgtggtggctgttaattatcctaaaggggtatcttaggaatttactttatttttcatccccatcactcttgatcgttatcaattcccacgctgtttcagagcgttaccttgcccttaaacattagcaatgtcgatttatcagagggccgacaggctcccacaggagaaaaccgatgagtaaattcctggaccggtttcgctacttcaaacagaagggtgaaacctttgccgatgggcatggccagcttctcaataccaaccgtgactgggaggatggatatcgccagcgttggcagcatgacaaaatcgtccgctctacccacggggtaaactgcaccggctcctgcagctggaaaatctacgtcaaaaacggtctggtcacctgggaaacccagcagactgactatccgcgtacccgtccggatctgccaaaccatgaacctcgcggctgcccgcgcggtgccagctactcctggtatctttacagtgccaaccgcctgaaatacccgatgatgcgcaaacgcctgatgaaaatgtggcgtgaagcgaaggcgctgcatagcgatccggttgaggcatgggcttctatcattgaagacgccgataaagcgaaaagctttaagcaggcgcgtggacgcggtggatttgttcgttcttcctggcaggaggtgaacgaactgatcgccgcatctaacgtttacaccatcaaaaactacggcccggaccgtgttgctggtttcagcccaattccggcaatgagcatggtttcttacgcaagcggtgcacgctatctcagcctgattggcggtacttgcttaagcttctacgactggtactgcgacttgcctcctgcgtctccgcaaacctggggcgagcaaactgacgtaccggaatctgctgactggtacaactccagctacatcatcgcctgggggagtaacgtgccgcagacgcgtaccccggatgctcacttctttactgaagtgcgttacaaagggaccaaaactgttgccgtcacaccagactacgctgaaatcgccaaactgtgcgatctgtggctggcaccgaaacagggcaccgatgcggcaatggcgctggcgatgggccacgtaatgctgcgtgaattccacctcgacaacccaagccagtatttcaccgactatgtgcgtcgctacaccgacatgccgatgctggtgatgctggaagaacgcgacggttactacgctgcaggtcgtatgctgcgcgctgctgatctggttgatgcgctgggccaggaaaacaatccggaatggaaaactgtcgcctttaataccaatggcgaaatggttgcgccgaacggttctattggcttccgctggggcgagaagggcaaatggaatcttgagcagcgcgacggcaaaactggcgaagaaaccgagctgcaactgagcctgctgggtagccaggatgagatcgctgaggtaggcttcccgtactttggtggcgacggcacggaacacttcaacaaagtggaactggaaaacgtgctgctgcacaaactgccggtgaaacgcctgcaactggctgatggcagcaccgccctggtgaccaccgtttatgatctgacgctggcaaactacggtctggaacgtggcctgaacgacgttaactgtgcaaccagctatgacgatgtgaaagcttataccccggcctgggccgagcagattaccggcgtttctcgcagccagattattcgcatcgcccgtgaatttgccgataacgctgataaaacgcacggtcgtagcatgattatcgtcggtgcggggctgaaccactggtatcacctcgatatgaactatcgtggtctgatcaacatgctgattttctgcggctgtgtcggtcagagcgggggcggctgggcgcactatgtaggtcaggaaaaactgcgtccgcaaaccggctggcagccgctggcgtttgcccttgactggcagcgtccggcgcgtcacatgaacagcacttcttatttctataaccactccagccagtggcgttatgaaaccgtcacggcggaagagttgctgagtccgatggcggacaaatcccgctataccggacacttgatcgactttaacgtccgtgcggaacgcatgggctggctgccgtctgcaccgcagttaggcactaacccgctgactatcgctggcgaagcggaaaaagccgggatgaatccggtggactatacggtgaaatccctgaaagagggttccatccgttttgcggcagaacaaccagaaaacggtaaaaaccacccgcgcaacctgttcatctggcgttctaacctgctcggttcttccggtaaaggtcatgagtttatgctcaagtacctgctggggacggagcacggtatccagggtaaagatctggggcaacagggcggcgtgaagccggaagaagtggactggcaggacaatggtctggaaggcaagctggatctggtggttacgctggacttccgtctgagcagcacctgtctctattccgacatcattttgccgacggcgacctggtacgaaaaagacgacatgaatactagcgatatgcatccgtttattcacccgctgtctgcggcggtcgatccggcctgggaagcgaaaagcgactgggaaatctacaaagccatcgcgaagaaattctccgaagtgtgcgtcggccatctgggtaaagaaaccgacatcgtcacgctgcctatccagcatgactctgccgctgaactggcgcagccgctggatgtgaaagactggaaaaaaggcgagtgcgacctgatcccaggtaaaaccgcgccacacattatggtcgtagagcgcgattatccggcgacttacgaacgctttacctctatcggcccgctgatggagaaaatcggtaatggcggtaaagggattgcctggaacacccagagcgagatggatctgctgcgtaagctcaactacaccaaagcggaaggtccggcgaaaggccagccgatgctgaacaccgcaattgatgcggcagagatgatcctgacactggcaccggaaaccaacggtcaggtagccgtgaaagcctgggctgccctgagcgaatttaccggtcgtgaccatacgcatctggcgctgaataaagaagacgagaagatccgcttccgcgatattcaggcacagccgcgcaaaattatctccagcccgacctggtctggtctggaagatgaacacgtttcttacaacgccggttacaccaacgttcacgagctgatcccatggcgtacgctctctggtcgtcagcaactgtatcaggatcaccagtggatgcgtgatttcggtgaaagcctgctggtttatcgtccgccgatcgacacccgtagcgtgaaagaagtgataggccagaaatccaacggcaaccaggaaaaagcgctcaacttcctgacgccgcaccagaagtggggtatccactccacctacagcgacaacctgctgatgctgactttaggtcgcggtggtccggtggtctggttgagtgaagccgatgccaaagatctgggtatcgccgataacgactggattgaagtcttcaacagcaacggtgctctgactgcccgtgcggttgtcagccagcgtgttccggcagggatgaccatgatgtaccacgcgcaggaacgtatcgttaacctgcctggtagcgaaattacccaacagcgtggtggtatccataacagcgtcacccgtatcacgccgaaaccgacgcatatgatcggcggctatgcccatctggcatacggctttaactactatggcaccgtaggttctaaccgcgatgagtttgttgtagtgcgtaagatgaagaacattgactggttagatggcgaaggcaatgaccaggtacaggagagcgtaaaatgaaaattcgtagtcaagtcggcatggtgctgaatctcgataagtgcatcggctgccacacctgtagtgttacctgtaaaaacgtctggaccagccgtgaaggcgtggaatatgcgtggttcaacaacgtggaaaccaagccgggccagggcttcccgactgactgggaaaaccaggaaaaatacaaaggcggctggatccgtaaaatcaacggcaaactgcagccgcgcatgggtaaccgtgccatgctgctgggtaaaatcttcgctaacccgcatctgccggggatcgacgattattacgagccgttcgattttgactatcagaacctgcataccgcgccggaaggcagcaaaagccagccgattgcccgtccgcgtagcctgattaccggggaacggatggcgaaaatcgaaaaagggccgaactgggaagatgacctgggcggtgagtttgacaaactggcgaaagacaagaacttcgacaacatccagaaggcgatgtatagccagttcgaaaacaccttcatgatgtatttgccgcgcctgtgcgaacactgcctgaacccggcatgtgtggcgacctgcccgagcggtgcgatttacaagcgtgaagaagatggcatcgtcctgatcgaccaggataaatgccgtggctggcgtatgtgcatcactggatgcccgtacaaaaaaatctacttcaactggaagagcggtaagtctgagaagtgcatcttctgctatccgcgtattgaagcgggtcagccgaccgtgtgcagtgaaacctgtgtcggtcgtatccgttatcttggcgtgctgttgtacgatgccgacgctattgaacgtgcagccagcaccgagaacgagaaagatctttaccagcgtcagctggacgtgttcctcgatccgaacgatccgaaagtcatcgagcaggcgattaaagacggtattccgctgagcgttattgaagccgcacagcagagcccggtttataaaatggcaatggaatggaaactggcgctgccgctgcatccggaatatcgcacactgccgatggtctggtacgtgccgcctctgtctccgattcagtctgcagcagacgcgggtgagctgggtagcaacggcattctgccagacgtcgaaagcctgcgtattccggtacagtatctggcgaatctgctgaccgccggtgataccaaaccggtactgcgcgcactgaaacgtatgctggcgatgcgtcattacaaacgtgctgaaaccgttgacggtaaagttgatacccgtgcgctggaagaggtcggtctgaccgaagcccaggcacaggagatgtaccgttatctggcgattgctaactacgaagatcgctttgtggtgccgagtagtcatcgtgaactggcacgggaagccttcccggagaaaaatggctgcggctttacctttggtgatggctgccacggtagtgataccaaattcaatctgttcaacagccgtcgtatcgatgccatcgatgtgaccagcaaaacggagccgcatccatgatcgaactcgtgattgtaagccgtctccttgaatatccggatgctgccttatggcagcatcaacaagagatgtttgaggcgattgccgcgagcaaaaatctgccaaaagaggatgcccatgcgctgggcattttcctgcgcgatttaacgacgatggatccgctcgatgcccaggcgcagtacagcgaactgttcgaccgtggccgcgccacgagtctgttgctgtttgaacatgtgcacggcgaatcccgcgaccgcggccaggcgatggtggacctgctggcgcagtacgagcagcacggcttgcagttaaacagccgcgaattgccggaccatctgccgctgtatctggagtacctggcgcagctgccgcaaagcgaagccgtggaaggtttgaaagatatcgcgccgattctggcattgctgagcgcgcgtctgcaacagcgtgaaagccgttatgccgtgctgtttgatctgctgctgaaactggcgaataccgctatcgacagcgacaaagtggcggaaaaaattgccgacgaagcgcgcgatgatacgccgcaggcgctggatgctgtctgggaagaagagcaggttaaattctttgctgacaaaggctgcggtgatagtgcaatcactgcgcatcagcgtcgctttgccggtgccgtcgcgccgcaatatctgaatatcaccaccggaggacagcactaatgcaattcctgaatatgttcttctttgatatctacccgtacatagccggggcggtcttcctgattggtagctggctgcgttatgactacgggcagtacacctggcgcgcggcgtccagccagatgctggatcgcaaagggatgaacctggcgagcaacctgttccatatcgggattctggggatttttgtcggtcacttcttcggtatgctgacgccgcactggatgtatgaagcctggctgccgattgaagtgaaacagaaaatggcaatgtttgctggtggtgccagcggcgtgctgtgtctgattggcggcgtgctgttgctgaaacgtcgtctgttcagcccacgcgtgcgtgcaaccactaccggagcggatatcctgatcctgagcctgctcgttatccagtgcgcgctgggcctgttgaccattccgttctccgctcagcatatggacggtagcgagatgatgaaactggttggctgggcgcagagcgtggtgaccttccacggtggcgcttctcaacacctcgatggtgtggcgtttatcttccgtctgcacctggtgctggggatgacgttattcctgctgttcccgttcagccgtctgatacacatctggagcgtaccggtggagtatctgacacgtaagtaccagctggtgcgcgctcgtcactaagcgaattttagttcacatagaccctgcttcggcggggtttttttatgggcacggtgcggggtgagttgtcggatgcgcttcgcttatccgacctacaggggaggatattgtaggcccggtaaacgtggtgccatcgggcaaaattagctcggagtaacaggttttgattatttaaggaagcgatggtggtgggggaaggattactcagcgctgcgcgcttcgcccttcgggtcgttgcctgcggcaacgctctcagcctggcgctcaagagcaaccttggtcgaagcttcagttccttccccgcttgggcagaatatttgattgcggatagctttgagaattccggggcttttgaaagtgatggtggtgggggaaggattactcagcgctgcgcgcttcgccctagcggtcgttgcctgcggcaacgctctctcgctgacgctcgagccgaaccttaatcgaagcttctcatccttccccgcatgggcagaatatttgattgcggattcgcttgagagttcagggacttttgaaagtgatggtggtgggggaaggattactcagcgctgcgcgcttcgcccttcgggtcgttgcctgcggcaacgctctctcgctggcgctcgagtgctaccttggtcgaagcttctcatccttccccgcatgggcagaatatttaattgcggattcgttgggaagttcagggacttttgaaagtgatggtggtgggggaaggattcgaaccttcgaagtcgatgacggcagatttacagtctgctccctttggccgctcgggaaccccaccaggggtaattcaaattttgaggtaatgcttgagatggtggtgggggaaggattattcgtcgcttcgctcctcacccttcgggccgttgcctgtggcaacgttctctcgctttcgctcgaatcgaaccttagtcgaaggttctcacccttccccgatgagtgcaaactttcacaatctcaccgaagttaccacatcgctgtggtgaattatggtggtgggggaaggattcgaaccttcgaagtcgatgacggcagatttacagtctgctccctttggccgctcgggaaccccaccacggggtaatgctttttactggcctgctcccttatcgggaagcggggcgcatcatatcaaatgacgcgccgctgtaaagtgttacgttgagaaaaatgaactggttgcgtaattttcatccgtaacggattaaaggtaaccagttatttttgctggcgattaaagaataatcgttcgattaccgtaaacaaagacgcgctgtgccagtactttgtatagtgcacgacttaagacgtttttctcgacgtcacgacctgcgcgcatcatatcttcagctgtgtaggtatgatcgacatgaataacgtcctgcatgatgattgggccttcgtccagattgtcattcacatagtgagcggttgcgccaataatcttcacaccacgttcataggcctggtgataaggacgtgcgccaataaacgctggcaggaaactatggtgaatattgatgatcttattcgggaagcgtgccacaaattccggcgttaatacccgcatatacttcgccagcaccacgtagtcaggttgataagcatcaatggcatccgccatcttttgatcgtgctcgttgcgggttaacccttcatggcttaccagctcaaacggaatatcaaaacgctcaaccagagaacgtaaagtatcgtggttaccaataactgccgcgatttcgacatccaggccgccgtaattggctttcatcaacaaatcgccaaggcaatgcgcttctttagtgaccagaatcactatccggcgacgaccggcaggattcagctcacgcacggagccttctggcaatgcgctatcgagatccgccagcagggtggaatcattaaaaatcccttccagttccgtgcgcataaaaaagcgcccggtacggtgatcaacaaattcattgttctgtacgatatttaactcgtgcttgtagcaaatattggtaatacgtgcgatcagacctttttggtccggacaaatagtacgcagaactttacgttggagactatgcattgctggaaaaaccttgttgagagtgtttgctaaaccgtaccgtcaaccattattggccgcagcactttttaaattttttaccactaccacaagggcagggatcgttgcgaccaaactgcggacgtgtaccgtcaatatagtaccattgaccgttttctttcaaaaatcggctacgttcaattattgcacctgttttaccaccttcggtaaatcgagcaacaaaactgacaaatccgatattgtcggcgtcctgccaacaatgttcaaatacggtcaatcccaaccattcagtatgcgcaaatccggccatcaattcggcacgtaacgccgctgctccacaagagggatgccaggtctttattaaataatctgcgtcttgcatcacaaaagcgcagtaacggctacgcatgagatgttctggatcaggtgcaaccttttcaccagacacataagggtggcaacataggctatactcgacagcactaccacagggacaaagctgagacacaaataatctccctggaaacaataacggcgtattaaccgcctgagtagcactatgttaaccgagcagtagcgatgtggctacgattgcattccaggggaatcttgcgggaataatgagaaagataaaaatagggctggcgctgggatctggcgcggcgagaggttggagccatattggcgttattaatgcgctaaaaaaagtgggtattgaaattgatatcgttgcaggatgtagtattggtagcctggtgggcgctgcctatgcatgcgatcgattatctgcgctggaagattgggtgacctctttcagttattgggatgttttacgcctgatggatctctcctggcagcgcggtgggttactgcgcggcgagcgtgtcttcaatcaataccgcgaaataatgccggaaacagagatcgaaaattgttcccgtcgctttgcggctgttgccaccaatttaagtacgggacgtgaattatggtttactgaaggcgatctccatcttgctattcgcgcaagttgcagtattccaggactcatggcacctgttgcacataacggctactggctggttgatggagcagtcgttaacccaattcctatttccctcacgcgtgcattgggggctgatattgtgatagcggttgacctgcagcacgatgctcatttgatgcaacaagatttgctctcctttaatgtcagtgaagaaaatagcgagaatggtgattctctgccgtggcatgcgcgtctgaaagaaaggttaggcagcataacgacacgtcgggcggtgacagcgccaacggcaacagagattatgaccacttctatccaggtgctggagaaccgccttaaaaggaaccgcatggcaggtgatccgcccgatattctgattcaacctgtttgcccgcaaatatctacgcttgatttccatcgcgcgcacgctgccattgcggccggacagctggcagtggaaaggaaaatggacgaacttttgccgttggtacgcaccaacatttgaccagaatttttatctacacttaagttaattctgacaggcgcaggtggcaatagcatgccactattgagtaaagccagtcaggggagagaacatgacgcagccattggtcggaaaacagattctcattgttgaagatgagcaggtatttcgcagccttctggatagttggttttccagtttgggagcgacaacggtactggcggctgatggggtggatgcccttgagttgctgggaggtttcactccagacctgatgatatgtgatatcgcgatgccacgaatgaacgggcttaaactgctggagcatatacgtaacagaggcgaccagaccccagttctggtgatatctgccactgaaaatatggcagatattgccaaagcgttacgtctgggcgttgaagatgttttgctgaaaccagttaaagatctgaatcgcttgcgcgagatggtttttgcctgtctctatcccagcatgtttaatagccgcgttgaggaagaggaaaggctttttcgcgactgggatgcaatggttgataaccctgccgcagcggcgaaattattacaggaactacaaccgccggttcagcaggtgatttcccattgccgggttaattatcgtcaattggttgccgcggacaaacccggcctggtgcttgatattgccgcacttagcgaaaacgatctggcattttattgccttgatgtcacccgagctggacataatggcgtacttgctgccttgttattacgcgcattgtttaacggattattacaggaacagcttgcacaccaaaatcaacggttgccagagttgggcgcgttattgaagcaggtaaaccatttacttcgtcaggccaatctgccggggcagtttccgctattagttggctattatcatcgcgaactgaaaaatctcattctggtttctgcgggtctgaatgcgacgttaaataccggcgaacaccaggtgcaaatcagtaatggtgttccgttaggcactttaggtaacgcttatttgaatcaattgagccagcgatgcgatgcctggcaatgccaaatatggggaaccggtggtcgactgcgcttgatgttgtctgcagaatgagcaaacgataacgcgggctaaatttgcattacctgctaatgtcggctggtggtactatcgtcgccattcgtataagtaattgtcttaattatgctaactcgcctccttttcagaacttagccccttcggggtgctgatatactgggatgcgatacagaaatatgaacacgttcaaaacacgaacagtccaggagaatttaaatggctgccattaatacgaaagtcaaaaaagccgttatccccgttgcgggattaggaaccaggatgttgccggcgacgaaagccatcccgaaagagatgctgccacttgtcgataagccattaattcaatacgtcgtgaatgaatgtattgcggctggcattactgaaattgtgctggttacacacagttctaaaaactctattgaaaaccactttgataccagttttgaactggaagcaatgctggaaaaacgtgtaaaacgtcaactgcttgatgaagtgcagtctatttgtccaccgcacgtgactattatgcaagttcgtcagggtctggcgaaaggcctgggacacgcggtattgtgtgctcacccggtagtgggtgatgaaccggtagctgttattttgcctgatgttattctggatgaatatgaatccgatttgagtcaggataacctggcagagatgatccgccgctttgatgaaacgggtcatagccagatcatggttgaaccggttgctgatgtgaccgcatatggcgttgtggattgcaaaggcgttgaattagcgccgggtgaaagcgtaccgatggttggtgtggtagaaaaaccgaaagcggatgttgcgccgtctaatctcgctattgtgggtcgttacgtacttagcgcggatatttggccgttgctggcaaaaacccctccgggagctggtgatgaaattcagctcaccgacgcaattgatatgctgatcgaaaaagaaacggtggaagcctatcatatgaaagggaagagccatgactgcggtaataaattaggttacatgcaggccttcgttgaatacggtattcgtcataacacccttggcacggaatttaaagcctggcttgaagaagagatgggcattaagaagtaacatccgtatcggtgttatccacgaaacggcgttgagcaatcgacgccgtttttttatagcttattcttattaaattgtcttaaaccggacaataaaaaatcccgccgctggcgggattttaagcaagtgcaatctacaaaagattattgcttgatcaggaaatcgtcgagggatttaccttgctcatccattgcttttttgattacagctggagtacggccttggccagtccaggttttagtttcgccgttttcgtcaacgtagctatattttgccggacgctgagcacgtttagctttggtgccagatttaacggcagcaaggctattcagcagttcgttcgggtcaataccgtcagcgatcagcatttcgcgatattgctgcagtttacgagtgcgctcttcaacttcagcagcagccgcgctttcttcttcgcgacgttcgttaacaacaacttctaatttttccagcatttcttccagcgtttcaagtgtacattctcttgcctgcgcacgaagagtacggatgttgttcagaattttaagtgcttcgctcattgtagtaatctcaaacttatattggggtggtttgttgaggtaataatagagccttaaattcagttgtgcaatagccaggaatgtaaggaattcaaaattgttctttattttgtgccgccaataaatatcttttcataaaattagccagaaaagacgcggcatatagccctatttacaccgatgatttcgcagcacgtgaggttaaaacttcctgattcatgtcacattttatggggagattatcgtaggctgacgacctttcagtcttctgtattagttgtgtttacgagaattccctattaagcgaatgatgaaaagtagaacagtcgcaataagagcatggacttagtattgcactatctcctggaggtcaacagagggctattacttgcgcaacaggttaaagattgtgaatagttaccagcagtcatttacccgcttataacaagcgaggcagttgtaatgatagctcagaaggattatgcaaggcttcgtaagggagaacgcatatacccacttctgtgcatactgttgagctgaaaaactgacgaattatgataaactccagccaactttatttcatatcattgagggcctgtggctgatggcacagctatatttctactattccgcaatgaatgcgggtaagtctacagcattgttgcaatctagttacaattaccaggaacgcggcatgcgcactgtcgtatatacggcagaaattgatgatcgctttggtgccgggaaagtcagtagccgtataggtttgagtagccctgcaaaattatttaaccaaaatagtagtttatttgatgagattcgtgcggaacatgaacagcaggcaattcattgcgtactggttgatgaatgccagtttttaaccagacaacaagtatatgaattaagcgaggttgtcgatcaactcgatatacccgtactttgttatggtttacgtaccgattttcgaggtgaattatttattggcagccaatacttactggcatggtccgacaaactggttgaattaaaaaccatctgtttttgtggccgtaaagcaagcatggtgctgcgtcttgatcaagcaggcagaccttataacgaaggtgagcaggtggtaattggtggtaatgaacgatacgtttctgtatgccgtaaacactataaagaggcgttacaagtcgacagtttaacggctattcaggaaaggcatcgccacgattaataagaatttctttactgacagggtgagcagggcacttttatcctgtcagttcgttttacgcacttcttccgggctatatacccttctcggcagttttttaacgccgctatacgcctcacagggctcttaagcaccgacgttgacttgtgacctgtaaagtacaatatccctgtgtttaggcgttatacatcgtcgcaaatatgatgaaggctaatgctgtcggtttatggaaaagttgctttgggtaaacaaaaaatacggccccagaagggcaatgccgttcacttaagaggagcggcactatgtttcacaggataacgggtttttgatatcttaaccgacctcggccttgatggtcgggggcgttttgttatgaacaccacttccagagcaccccgaagatgctccagtcgtttcgggatggtccctggtgacgccgtgtttcccagctctatcatttctgatgcgatattcttccacgcaggcagtagccagtggcggttacaacccttctggttcagcgtcagcagcaggtcttcgctgtaaaaaagtttatcaaacaacgtaatagagttatccgggatggtggcgagcatggagtgggccagcacagtttcgctctgccggtaaggtgcggtcacggcattcagcagaatgtgacttcccaggttcattaaggccaccagacgcataaccgggtaggcgttctgccgcttagtggatgtgttggcagacccataatattcacgcagctcgggtttatcaggtgtcctgaactgtgcgccatcaatggcaaaaagttgcaggccgtgccagtcatccttcaggtaacgttccgcgcccctgtctgtgcggtctggcggaagagccattccactggggcggcccccacgcgctgacgcgcctgggtgacagcgctgcgggccagcaggttcatccccgcttcgccatccgcgctcaggttcagacggcgaacaacatcggtaattggctcattgcaccaccatccagataaccatgtcccccggtaaacgacggcggcgaacggtcgcatgagcagaaagcgtcaggcagtgttgtatccactcggtgggaaggtgttctgcaaatagttgtgcagagggcggaggcataagcggatggtcactgaaatcgagcagatcattgagaagtggcataagaaaacggctccctgttgtggaagccgttatagtgcctcagtttaaggatcggtcaactaatccttaactgatcggcattgcccagaaggggccgtttatgttgccagacagcgctactgattaagcggattttttcgcttttttctcagctttagccggagcagcttctttcttcgctgcagtttcaccttctacataatcacgaccgtagtaggtatccagcagaatctgtttcagctcggagatcagcgggtaacgcgggttagcgccggtgcactggtcatcgaatgcatcttcagacagtttatccacgttcgccaggaagtctgcttcctgaacgccagcttcacggatagatttcggaatacccagttcagctttcagcgtttccagccatgccagcagtttctcgatcttagcagcagtacggtcgcccggtgcgctcagacccaagtggtcggcaatttcagcataacgacggcgagcctgcggacggtcatactggctgaatgcagtctgcttggtcgggttgtcgttcgcattgtagcgaataacgttacaaatcagcagggcgtttgccagaccgtgcggaatatggaactgggaacccagtttgtgcgccatactgtgacatacacccaggaaggcgttcgcaaacgcgatacccgcgatagtcgctgcactgtgaacacgttcacgcgctaccggatttttagacccttcgtggtaggacgctggcagatattctttcagcagtttcagtgcctgcagagcctgaccatcagagaactcagatgccagtacagaaacataagcttccatggcgtgagttactgcgtccagaccaccgaaagcacacagggacttcggcatgtccataaccaggttggcgtcgacaatcgccatatccggagtcagcgcatagtctgccagcggatatttctgaccagtagcgtcgtcagttacaaccgcaaacggagtgacttcagaacctgtaccagaagtggtggtgacagcgatcattttcgctttcacgcccattttcgggaacttgtagatacgtttacggatatccataaagcgcagcgccagctcttcgaagtgagtttccggatgttcgtacataacccacatgatcttcgcggcgtccatcggggaaccaccacccagcgcgataatcacgtctggtttgaaggagtttgccagttctgcacctttacgaacgatgctcagggtcgggtccgcttctacttcgaagaagacttcagtttcaacgcctgctgctttcagtacggaagtgatctgatcagcataaccattgttgaacaggaagcggtcagtcacgatgagcgcacgtttgtggccatcagtaatcacttcatccagcgcgattggcagggagccacggcggaagtagatagatttcggaagtttgtgccacaacatgttttcagctcgcttagcaacggttttcttgttgatcaggtgtttcggaccaacgttttcagagatggagttaccaccccaagaaccacaacccagagtcagggaaggtgcgagtttgaagttatacaggtcaccgataccaccctgagacgctggggtgttaatcaggatacgcgccgttttcattttctgaccgaagtaagaaacgcgagccggttggttatcctggtcagtgtacaggcaagaggtatgaccgataccgcccatagcaaccagtttctctgctttttctaccgcgtcttcgaaatctttagcgcggtacattgccagagtcggggacagtttttcatgtgcgaacggttcgctttcatcaacaacggtcacttcaccgatcagaatcttggtgttttctggtacagagaagcctgccagttcagcaattttataggctggctgaccaacgatagccgcgttcagcgcaccgtttttcaggataacatcctgaacagctttcagctctttaccctgcaacagatagccgccgtgggttgcaaaacgttcacgtacagcgtcataaacagagtcaacaacaacaacagactgttcagaagcacagattacgccgttgtcgaaggttttggacatcagtacagatgcaactgcacgtttgatatcagcagtttcatcgataacaactggagtgttgcccgcgcctacaccgatagctggtttaccggagctgtatgcggctttaaccatgcccggaccaccagtcgcgaggatcaggttgatgtctgggtggtgcatcagtgcgttagacagttcaacagaaggttgatcgatccagccgatcagatctttcggagcaccggcagcgatagcagcctgcagaacgatatcagccgctttgttggtggcatcttttgcacgcgggtgcggggagaagataatggcgttacgggtcttcagactgatcaggcttttgaagatagcagtactagtcgggttagtggtcggaacgataccgcaaataataccgattggttcagcgatagtgatggtaccaaaagtgtcgtcttcagacagaacaccacaggttttttcatctttataggcgttgtagatatattcagaagcaaagtggtttttgatcactttatcttcgacgatacccatgccggattcggcaacggccattttcgcgagtgggattcgagcatctgcagcagccagagcggcggcgcggaagattttgtctacttgctcttgagtgaaactggcatattcacgctgggctttttttacacgctctacgagtgcgttaagttcagcgacattagtaacagccataatgctctcctgataatgttaaacttttttagtaaatcatctgctcgaatacgagagtatagtcagtgcggtgatgatttgcttaacctatgaaaatcaaaagcttactcgcgctcacactcactgtgatttactaaaagagtttaaacattagagttattatctctaatgcgtcacttccaggtggcgtaagcaagattactcacttctgggtactgattacgtgatccaaatcaaatttttgcaaagctgacacctttcagcatcgcttttcgccattatagctaacagttaataaattgtagtatgatttggtggctacattagcatgttttgcacaactagataacaataacgaatgatagcaattttaagtagttaggaggtgaaaaatgctgtcaaaaggcgtattgtcagcgcgtcttttcaaccttatttatggctaacattatccggcttttgcttcggagctaaccgtgattcagaccttttttgattttcccgtttacttcaaatttttcatcgggttatttgcgctggtcaacccggtagggattattcccgtctttatcagcatgaccagttatcagacagcggcagcgcgaaacaaaactaaccttacagccaacctgtctgtggccattatcttgtggatcagcctttttctcggcgacacgattctacaactttttggtataagtattgatagcttccgtatcgccgggggtatcctggtggtgacaatagcgatgagcatgatcagcggcaagcttggcgaggataaacagaacaagcaagaaaaaagtgaaaccgcggtacgtgaaagcattggtgtggtgccactggcgttgccgttgatggcggggccaggggcgatcagttctaccatcgtctggggtacgcgttatcacagcattagctatctgtttggtttctttgtggctattgcattgttcgctttatgttgttggggattgttccgcatggcaccgtggctggtacgggttttacgccagaccggcatcaacgtgattacgcgtattatggggctattgctgatggcattggggattgaatttatcgttactggtattaaggggattttccccggcctgcttaattaattcctttcaaatgaaacggagctgccatgctccgtttacttcgtcattatttttactttgttcccgcgcagttatcaaaagcaaaaggaataggtaaaaatattcttctcaaattacagttagttataaggatttccttaactgcttctcctcaccatcatgttattttcgccacatcataatcctgggcttgctgaagaataattgaaatgatattattaattccactgcctttggtagaggaaagtgctaaataataatcaattgttaaattattgtgcatttcactactggaactgtaatcagaaaagatagacatgcttagccaatctctatttgattgaattgaaagatgtttgttaaggcatggatgcaagctatagattctgatacggtcaataaaagagaattgcttaacaattttgcaaaatgtattggcgagtaagaaccgcatttggtactttccgggcaaccgccagacgattctttattggtaatgagaataattaacaattaaagagcgtcgcgaaagaataatgtgtctcgacaggggagacacagtacgaatcgacataaggtgatcgtctgaatcaccagaataaataaagtcggtgatagtaatacgtaacgataaagtaacctgacagcagaaagtctccgagcctgtgcagggtcccaatccgggattacacatgctggttaataccagtaattataatgagggagtccaaaaaacaatgaccaacatcaccaagagaagtttagtagcagctggcgttctggctgcgctaatggcagggaatgtcgcgctggcagctgatgtacccgcaggcgtcacactggcggaaaaacaaacactggtacgtaacaatggtagtgaagttcagagtttagatccgcacaaaattgaaggtgttccggagtctaatatcagccgagacctgtttgaaggcttactggtcagcgatcttgacggtcatccagcacctggcgtcgctgaatcctgggataataaagacgcgaaagtctggaccttccatttgcgtaaagatgcgaaatggtctgatggcacgccagtcacagcacaagactttgtgtatagctggcaacgttctgttgatccgaacactgcttctccgtatgccagttatctgcaatatgggcatatcgccggtattgatgaaattcttgaagggaaaaaaccgattaccgatctcggcgtgaaagctattgatgatcacacattagaagtcaccttaagtgaacccgttccgtacttctataaattacttgttcacccaagtactagtccggtgccaaaagccgctatcgagaaattcggcgaaaaatggacccagcctggtaatatcgtcaccaacggtgcctataccttaaaagattgggtcgtaaacgaacgaatcgttcttgaacgcagcccgacctactggaacaacgcgaaaaccgttattaaccaggtaacctatttgcctattgcttctgaagttaccgatgtcaaccgctaccgtagtggtgaaatcgacatgacgaataacagcatgccgatcgaattgttccagaagctgaaaaaagagatcccggacgaagttcacgttgatccatacctgtgcacttactattacgaaattaacaaccagaaaccgccattcaacgatgtgcgtgtgcgtaccgcactgaaactaggtatggaccgcgatatcattgttaataaagtgaaagcgcagggcaacatgcccgcctatggttacactccaccgtatactgatggcgcaaaattgactcagccagaatggtttggctggagccaggaaaaacgtaacgaagaagcgaaaaaactgctggctgaagcgggttataccgcagacaaaccgttgaccatcaacctgttgtataacacctccgatctgcataaaaagctggcgattgctgcctctagtttgtggaagaaaaacattggtgtaaacgtcaaactggttaaccaggagtggaaaacgttcctcgacacccgtcaccagggtacttttgatgtggcccgtgcaggctggtgtgctgactacaacgaaccaacttccttcctgaacaccatgcttagcaacagcagcatgaataccgcgcattataagagcccggcctttgacagcattatggcggaaacgctgaaagtgactgacgaggcgcagcgcacagctctgtacactaaagcagaacaacagctggataaggatagcgccattgttcctgtttattactacgtgaatgcgcgtctggtgaaaccgtgggttggtggctataccggcaaagatccgctggataatacctatacccggaatatgtacattgtgaagcactaatggcaatacgtggggcaggagtgtcctgctccacggtgtctgatttttatcgcattacagaaggcacaggccagaaggtagggcaatgttaaaatttattctacgtcgctgtctggaagcgattccgatgctatttattcttattactattagcttctttatgatgcgcctcgcgccgggaagcccttttaccggcgaacgtactttaccgccagaagtgatggccaatatcgaagcgaaatatcatcttaatgatccgatcatgacacagtatttcagctacctgaaacaactggcgcacggtgatttcggtccaagctttaaatataaagattatagcgtcaatgacttggttgcatccagttttcccgtttctgccaaactgggagccgcagcatttttccttgcggtaatactgggtgttagtgctggcgttattgccgcattaaaacaaaacaccaaatgggactataccgtgatggggctggcaatgaccggggttgttatccccagttttgtggttgcaccattattagtcatgatatttgcgatcattttgcattggctgccgggcggtggctggaatggtggggcgcttaaattcatgatattgccgatggtggcgttgagtctcgcttatatcgccagtattgcgcgtattacccgtggctctatgattgaagtattacactccaattttattcgtactgcccgggcgaaagggttacctatgcggcggatcattttacgtcacgcattaaaacctgctctgttacccgtgctctcttatatgggccccgcatttgtcggcattattaccggttctatggttatcgaaaccatttatggtttgccggggattggacaactgttcgttaatggcgcattgaaccgtgactattccttagtgttaagcctgaccatcctggttggtgctttaaccattttgtttaatgccattgtcgatgtgctatatgcggttatcgacccgaaaatccgttactgatactggagctcgcgatgatgttaagtaagaaaaacagcgagacgctggaaaatttcagtgaaaagctggaggtcgaagggcgcagcttgtggcaggacgcacgtcgacgttttatgcataaccgtgcggcggttgccagtctgatagtgctggtgctgatcgcgttatttgtaatcctggcaccgatgctttcccagtttgcctatgacgatactgactgggcgatgatgtccagcgccccggatatggagtccggtcactactttggtactgacagttccggtcgcgacctgcttgtgcgcgttgcgattggcgggcgtatcagtctcatggtcggtgttgctgcggcactggtggctgtggtcgtcgggacactttatggtagcctttccggttatctgggcggtaaagtggatagcgtaatgatgcgtctgctggaaatcctcaactccttcccattcatgttcttcgtcattttgctggtgacctttttcggtcaaaacatcctgctgattttcgtggcgataggcatggtttcctggctggatatggctcgtattgtgcgtgggcaaaccctgagtctgaagcgcaaagagtttattgaggcggcacaagttggcggtgtaagcacaagcggcattgttattcgccacattgtgccgaatgtactcggtgtggtggtggtctacgcaagtcttctggtgcccagcatgatcctctttgaatctttccttagcttcctggggttgggtacgcaagagccgttaagcagctggggtgcattgctgagtgatggcgcgaacagcatggaagtctctccatggttattgttgttcccagcgggattcctcgtggtgacgctgttttgtttcaactttatcggcgatggcttgcgtgatgccctcgacccgaaagatcgttaaggagtgcagccatgagcgtaattgaaactgcaactgtgccgctcgcacaacaacaggctgacgcactgctgaacgtgaaagatttgcgtgtcacctttagtaccccggacggcgacgtcacggcggtcaatgatttgaatttttccctacgtgccggagaaacgctgggtattgtaggtgagtctggtagcggtaaaagccaaactgcatttgcgttgatgggcctgttggctgccaacggacgtattggcggaagcgcaaccttcaatgggcgtgaaatcctcaatttgccagagcatgaactcaataaactgcgcgctgaacaaatcagtatgatttttcaggacccaatgactagcttgaatccctatatgcgcgtcggtgagcagttgatggaagtgctgatgctgcataagaacatgagcaaagctgaggcgtttgaagagagcgtgcggatgctcgatgcggtaaaaatgccggaagcgcgtaaacgcatgaaaatgtacccgcacgaattttctggcggcatgcgtcagcgagtcatgattgcgatggccttgttatgtcgacctaagctgctgattgcggatgaaccaacaactgcgctggacgtcaccgtacaggcgcagatcatgacgctattaaatgaactgaagcgggaatttaataccgccatcattatgatcacccacgatcttgtcgtggtggcggggatctgcgacaaagtgctggtaatgtacgccgggcgcacgatggaatatggcaacgcgcgcgatgtcttttatcaacccgttcatccttattctatcggtttgctcaacgcggtgccgcgtctcgatgcggaaggtgaaacaatgttgaccatcccgggtaatccgccaaacctgctgcgattaccgaaaggttgcccgttccagccacgttgtccgcatgcgatggaaatttgtagtagcgcaccgccgctggaagagtttacgcctggccgtctgcgtgcttgctttaaaccggtggaggaactgttatgaatgctgtaactgaaggaagaaaagtcctccttgaaatcgccgatcttaaagtgcactttgaaatcaaagatggcaaacagtggttctggcaaccgccgaaaacgctcaaagccgtcgatggtgtcactcttcgcctgtatgaaggggaaacattaggtgtggtaggggaaagcggatgcggtaagtccacctttgctcgcgccatcatcggtttggtcaaggcgaccgacggtcatgttgcctggttaggtaaagagttgctgggcatgaaacccgatgaatggcgtgccgttcgcagtgatattcagatgattttccaggatccgttggcaagcctaaacccgcgtatgaccatcggcgagatcatcgctgaaccactgcgtacttatcatccgaaaatgagtcgccaggaagttcgcgagcgcgtgaaggcgatgatgctgaaagtcgggttattgcctaacctgattaaccgctatccgcatgagttctctggtgggcagtgccagcgtatcgggattgcgcgtgctcttattcttgaaccgaagctgattatctgtgatgagccggtgagcgcgctggacgtgagtattcaggcacaggtggtcaacctgctccagcaattgcaacgtgagatgggattgagtttaatttttatcgctcatgacctggccgtggtaaaacacatttccgatcgtgtgttggtgatgtatctcggccatgcggtagaactggggacctatgatgaggtctaccacaatccactacatccttacaccagggcattgatgagcgcagtccccatacctgatccggatctggagaagaacaaaaccatccagttactggaaggggaattaccgagcccgatcaacccgccttccggttgtgttttccgtacccgttgcccgattgccggtccagagtgcgccaaaacacgtcctgttctggaggggagtttcagacactccgtttcttgcctgaaagtcgatccgctttaaaaacaataagggctgacagttgtcagccctttttcacgctaaaagcgattatttattcccgccagatgatatggcaaagtttgtgatctttttcgcggcataacagaatgcgggcaaaaacatcgttgatttcaccatcttcactgtccgccagaccaatcaccacttcggcaaaaaagtccgggttcaaatcgaaatcaacatgttcctgccagtcttccgccggatcgaataactccgcgccgccgcgctcttcaaactgaagattgaacagcaggacatcagctggatcgagattgtcggcagccagttcgagaaaaatatcgtaggcctgttcaagcgtttcatcttcagtcaggcgattgtttagatccatatccatagttactacctgtttaacctctgttggcgacgttttacagcaacggactgaagaagtaaaacagtcgctcggcgacacgttgccataatggacgttttagccataaacgggcatcgagcagacgactacggctaatataatcgtcctgaacggcggcgaggtcagcaccaaaacctttatcgtcgattgccagggtaatctcgaaatttagccacagactacgcatatcaaggttaactgtgccaaccagacttagttcgccatcgaccagcacgctcttggtatgcagtaacccgccttcaaactgataaattttaaccccagcagccagcagttccgtaaagaatgcgcgactggcccagccgaccagcatgctgtcattttttcgcggaaggataatactgacatccaccccgcgctgcgccgccgtgcaaatcgcatgaagtaaatcatcgcttggcacaaagtagggcgtggtcatgatcaaatattcacgcgcgctataagccgcagtcaataatgcctggtgaatgagatcttccggaaagccggggccagaagcaattgtgtgaatggtgtgaccgctggcctgttcaaacggcataatattgacatctggtggtggcggcagaatacgttttccggtttcaatctcccagtcgcaggaataaataatccccatcgcggtggcgatagggccttccatacgcgccatcagatcaatccattgccctacgcccgcatcttgtttgaagtagcgaggatcgaccatattcatgctgccggtgtacgcgatgtaattatcgatcatgatcatcttgcgatgttggcgcaggtccatacggcgtaaaaacacacgcatcagattgacctttaaggcttcgaccacttcaataccggcattacgcattagctcgggccacgggctgcggaaaaaagccacactcccggcggagtcgagcatcaatcggcaatgaatgccgcgtcgcgcagccgccattaaactttcagccacctggtccgccatgccgccgggctgccagatataaaacaccatctcaatattatggcgcgcgagctggatgtcgcggattaacgcctgcatcacatcatcactctcggtcatcagttgtagctgattccctttgaccccagcgatcccctgacgacgctcgcaaagcttgaataatggcgcagcgacactgctattttcttcggcgaagatatgcttacaggctttaaggtcgttaagccattttgcggtggaaggccacatcgctctggcgcgctcagcgcggcgtttgcctaaatggagctcgccaacggcaagataggcaataattccgactaacggcagaatgtaaataatcaacagccaggccatcgcggagggaactgcgcgtcgtttcattagaatgcgtaaagttacgcctgcaatgagcaaccagtatcccagaatggccaaccaactcaccaacgtataaacggttgtcatagattagaaatccttttgaaagcgcattgttatgagtttacgcatatggattcatctggcaaataaaaacgcgggaaaagcactggtcagcgtcgggggtgggggtataatgaccattctgttattgcatagagtagttaacatgaagcggagtagaacggaagtggggcgctggcgcatgcagcgtcaggctagccgacgtaaatcgcgttggcttgaggggcaatcgcgccgaaatatgcgtatccacagcatcaggaagtgcattctaaacaaacagcgtaactcgttattgtttgcgatctacaatatctaaatgtactgggcaccattgcggtgcccaataagtttactcttccgtctttaaactttatttttgcgcgctttctttactgtcagctttcgtttctagttcatcgttatcgctgaaaataccatgaccactgttcaacaacatactaacgagcatatcattattaatctcttcaccatttaaaactcgcgccagaatttcgctgccaaacagttgcggactgagaatgatatccggatgtaccatcttaatcttattcaggtttttgctatcactgacggcgagaactgttttgacatcactgctcatatcttttgcgctgagtacaacaaacgcgttatctgcatcgttatcactcagcgccagaatggcccggcaacgatcgattcccgctttctttaatacagaactgtcattactgtcaccggggataacatcagcattatcgcctaagcgttgctcaagttgcttgatatcatcttcaggcaagttgctgataaccgttacgttttgtccgcgttgattcagttgcaggatcgtattgatggcgagaatgctatgtccgcaaacaataaaatgatctttacgatgcattgtatgattgtttccttttacaagtttgttgaatcccccgcggataagcggaccaaaaatactggtcatagatgtggcaaaaacggtaatgccggaaataatgacgctaatagtgaacaatcgtgcactttcagaaacagggacaatatcgccatagccgacggtactcatggtttctatgctaaaatagaacgcggtcatcaaactttctattcgcggattaaaaccttcgcttaaataaagcgcaccgtaggtactgtaaaacagtaatgtcgtgaaactaataaatgcaaaaattgtcccggctgcggcgctactgtgggagaagtctttgcgcagtatcagcaaaaacaccagcgtaaaaatgcaaaatccaatactaaatttcagccagggataaaaatgcagggtgtaaattagcgctatcaacaacaaaatgatactgattgcccatgcgagctttgcccggaacagtaagccaatggagttcaggacaagaaagacgccgagcataaagagtggggcgtttgccagcaaggagagatccaactcactaaatgctttgatatggaaaatatcaagcaaattgacgctcataccatagattgttttaaaaataagcaatccatttaaaaagacggccagcgcgagaatgtcgtgccgaagggtcacccataaatttgttgctgtttgtttgaatgtagcccagtgactcactgatacctctgtaaccacaattttgtttaattatcttagcgtgcacattttctgaacatacatgcagcgcgtgaatgtgttaaacaatagtagatgactttatccgcagtaatcaaaggatttgagcgagcaactgtacctcaggaaaggtcatttttcctgaatatgctcacatcatataaagaaatacagataaagttattatctgcttgtggtggtgaatgcactgaccggctataaggaaaggccaaacaagaacacggttgcaaaaaccgtgcccttaaatattgaatctctattcagaacactttcttaaatggtttcacactaacgtgttcatagactcctgccgctacgtacgggtcagcatcggcccaggcctgagctgcttccaggctttcaaattcagcaataacggtactgccagtaaatcccgcagcccctggatcgttactgtctaccgctggcattggaccagctgtcaacaaacgaccttcatcatgcagtaactgtaaacgtgctaaatgtgccggacgaacggaaaggcgtttttcgaggctatcagctttgtcttgagcgtaaataacatacaacacgggcacaactccttgttcgggaaagttgtaaagtacgttatttgaaagggcgaagatctgcaacggaaagatgatgtctttgttaaggccatgcataaagtaagggtaattacgccaaaaatgacattttcactgatcctgatcgtcttgccttattgaatatgattgctatttgcatttaaaatcgagacctggtttttctactgaaatgattatgacttcaatgacccttgatttacctcgccgcttcccctggccgacgttacttagcgtctgcattcatggtgctgttgtggcgggtctgctctataccagcgtacatcaggttattgaactacctgcgcctgcgcagccgatttctgtcacgatggttacgcctgctgatctcgaaccgccacaagccgttcagccgccaccggagccggtggtagagccagaaccggaacctgagccgatccccgaaccgccaaaagaagcaccggtggtcattgaaaagccgaagccgaaacctaagccaaaaccgaagccggtgaaaaaggtacaggagcagccaaaacgcgatgtcaaacccgtagagagccgtccggcaagtccgtttgaaaatacggcaccggcacgcctgacaagtagtacagcaacggctgcaaccagcaagccggttaccagtgtggctagtggaccacgcgcattaagccgtaatcagccgcagtatccggcacgagcacaggcattgcgcattgaagggcaggttaaagttaaatttgacgttacgccggatggtcgcgtggataacgtacaaatcctcagtgccaagcctgcgaacatgtttgagcgtgaggtgaaaaatgcgatgcgcagatggcgttatgagccgggtaagccaggcagtgggattgtggtgaatatcctgtttaaaattaacggcaccaccgaaattcagtaagcagaaagtcaaaagcctccgaccggaggcttttgactattactcaacaggtaaggcgcgaggttttccttcaggatcaaccgcgacatacttaaataatgcttctgtcgctttatagcgttgcccaattggttcagacgctacttttttcacccacacttcaatattaatgctgacgcttgtcgtccctttctggacacagcgtgcatagcagcacaccacatcgccgaccgcaaccggccgtaagaaagtcattccttcaacccgcacagtcactacgcgaccgtgggcaatttcttttgccagaatagcgccgccaatatccatttgactcattaaccaaccaccaaagatgtcaccattggcattggtatcggcgggcatggctaaagtacgtaaaacaagatcgccctgagggacgttatgtgttgtagacatggtaaaaccgacttaaaaggaaaatcacaggcgcgatgctactatgattttcctgaggagaacagaggagatacagcgccagccccgaaggactggcagtctggttaggatttatcttcctgcggcatgtggcggtagatatagataccgcttaacaatgtgaagattaaggtaagggcggtcaggccaaagactttaaagttgacccaaatattttgcggcagccagaatgcgatgtagatgtttgccagaccgcaaaggataaagaaaacagcccaggccagattcagcttgctccataccggttgcggcagcgtgagttctttacccagcatccgctgaattagcggctttttcatcacccattggctgactaacagggctcccgcaaatagagcataaatgacagtaaccttccatttaataaactcatcattgtggaagaacagcgtcaagccaccgaagacgaccaccagaacaaaagtgatcagggccatcttctcaaccttacgaaagcgaacccagctatagataagcacaatcgccgtggcgacgatcagcgccgcagtagccgcatagatgtcataaatcttgtaaaacgcgaaaaagacaaccagcggtaaaaaatcaagaaactgcttcattttacgattccgtaatcaaatgcttaaggttattggcgaatcaacatatacaggcggaacagatagatgagcaatatggcactaatcaggttgctcaaggtgttcgccagtacggcaccaatttccggggttaatgcggcaaaagaagaggcaaaaagcagcaacagtgtttttgccagcaaccagctcagtactgcgggtgccaccagacgcatattcgcccaagtcagccgcatactgctacgcatgctggcaaaaacgcccattttgtcctgtaccaacatcaccggtgccagggccagtaaaatggccatgataattcccggaacgaccaccagcatgatgccaatctgtactaaaagggtagtcagaaaaatcagaataaataactttggcaatatcggcgcactggcaccaatagctcgcagcgcactgactctctgacccgcagacaccagctggataattaatattacgcctccggcgagaatggcgttaccgattaatccactaaaagtggacgccgcactagcctgcagcaaaatttgttgctgttccggactcatattctgaaccaggtcgaacaacccactactgccgctaacgggcacgcagtcattgagctgcgcaagctgtgcatcactgggactgaaagcatgccctaacaccactgtgataaacgcacatagcaagcttaccaacagaatggtcataaattgattacggaagaaatttccggtgtcacggtatacggactgcgccgtgatagacatgcactctccttgagttttatgcaggtgttaattagcgggcaattgtaccctggttaagcctcgggtggcagcatcaggtcttgtatggaaaagcatatctttgtaaagcggaggtaattgctggccttcaggcatgggcaaatcgcggcaagtggcgaccgagttaatatttgcgtagcgaaaatatttaaaaattgatttaaatcacattaaccaggattctcaatgcaacttctaaattaatccagatcaataaagggtgaattatcatatgtaatgtgatctatgtaggatcatttgttactccaatgtaggtatattcgtcacgtttttataaccataacgacggagcggatatgaaaaagttaacagtggcggctttggcagtaacaactcttctctctggcagtgcctttgcgcatgaagcaggcgaattttttatgcgtgcaggttctgcaaccgtacgtccaacagaaggtgctggtggtacgttaggaagtctgggtggattcagcgtgaccaataacacgcaactgggccttacgtttacttatatggcgaccgacaacattggtgtggaattactggcagcgacgccgttccgccataaaatcggcacccgggcgaccggcgatattgcaaccgttcatcatctgccaccaacactgatggcgcagtggtattttggtgatgccagcagcaaattccgtccttacgttggggcaggtattaactacaccaccttctttgataatggatttaacgatcatggcaaagaggcagggctttccgatctcagtctgaaagattcctggggagctgccgggcaggtgggggttgattatctgattaaccgtgactggttggttaacatgagtgtgtggtacatggatatcgataccaccgccaattataagctgggcggtgcacagcaacacgatagcgtacgcctcgatccgtgggtgtttatgttcagtgcaggatatcgtttttaattccgcacaaaaacgaccccgtaatatacggggtcaataaggacatggtataaagggtattatttcttcgcttctacgccatcagtttcagagcgaattaaaaatttctcagttgtttgcggaatattctgaatcagccagtcggccatttgcttttcctcatttaaaatcgcttcgatggttggaatactagctgtatcaccggcattttttgctgctgctaatagactggtgtaacaggcgatttcaaattgctcgaagacatatccgctaatagagcctttgactatttcatcagaagggaatataccaccgatactctgcccaagcgcagccattttactcatggaatctttaatgacactacgactaatgtcattacgatcaagaatagtttccagttgaacaatctggtttttggtttcactaagatgttgttcaatacgagcgcgtagttcaggataattatctatacggctggccatggattcaagcatagattcggcttgcttttccattgcgtgggcgtcacgtaaccagtcatgataatgttcaatacgattcatgaaaatgtcctctttataaaatgactaaaagttaaaattcatatttcaggctttattttcggctttcttatttacgttattaatggccagatcagtcagtttgatgtcggtggccttttcttcttccagggtttctttcagaagcttcgctgctttacggtaacctaattgttcagccagcgtcgctaatgtcccgtaactggcaatctcataatgctcgactttctgtgctgcggcaatcagtgcggcatcacgcacttcgtttttctcggtactttcgatgacctcattagcttcttcaataagaccttccattgccacacatttcatgcgcttaattttcaggttgctttcggactccacaacttgatcaatacgttcaatctgtccatgagtttcctcgaggtgcgcatgaaaagcctgacttaatttttcattacttgttgctcttgcgagttttgccagtgcccgggttaattgtttttctgcgctgtaggtatcactaagcaggtgaataaatacatcttcaatggtcttcatattcatatttttctccagtgaaatcactgcgagccatacggcccgcagatgcaattatctttatcagctgatattaataattaacggtgaatcaggatttgccacttttattaccaccgctttgttgaccgccttttttacccgcttcagatgcgcgttgcggatcatttttaaaattaccgccgctatgctgaccgcctttacggcctgcgtcggatgccttctcacggtcttcggcgaaatttccactaccaccacgatgttcggccatgttatttctcccgttgcgttgcattgtttcattaatatgagtgttgtgtgtcgacactcattaaaattagtcgctaatgagaattagtcaaattaagcgcaacgagaagatagagggaaaatatattttgaggaacattctggatatattaacaattacctgaggaataagtgacttagagaaaattattgattttactggtgttatgttgcgggattaatttgtttgattatattactgttgggcggaaaaatgacgtaagttgacgttcgaccggggtaagcgaaacggtaaaaagataaatattaaatgaatttaggatttttccggcttcattaaagaaagttaaaatgccgccagcggaactggcggctgtgggattaactgcgcgtcgccgctttcatcggttgtacaaaaactttcagtgccgccagcattttctctggctcattaatatgttgctcgatgattttaacaatggcgctaccagaaatcgcgcccgcagctcctgcatcaatcgctgcttttacctgatccggggcggaaataccaaatccctgcaatggaggtgcagcgttgtactctttcagcttcgcaaccagatgattgaggggtaacgcggcgcggttttctgcgccggtcacgcctgctcgactcagcaaataggtgtaaccacgaccgtaagaggctatctggcgcagcaggtcgtcatcggcatttggcgggcagatgaagataggtgcgacattatgacgcaacgcggcctggcggaagggcgcggactcttcaactggcacatcggcaaccagcacgctatcgacgccgactttttcgcactgggcataaaactcatcaatgcctttgttaaacaccagattggcatacatcaacaggccaatgggaatggtcgggtgtttctggcgaatcagtgccagcatttcaaaacattgtgccggagtcacacctgccgcaaaggcgcgcagagtggcgttttgaatcgtcgggccatccgccagtgggtcggagaaggggatacctaactccagcgcgtcagcaccggcttcaattagcgtatcgataattttcaaactctgctcaatgcccggatcaccgagcgtgacgaaaggaacgaatgcgccttctttgcgctccttcaactgggcaaacagagattcgtagcgttccatcagatttcccctcgtgctttcaaaatatcgtgaacggtgaagatgtctttatcgccgcgaccggaaaggttaaccaccagtagctgctctttatccgggttttcgcgcatcattttcaacgcatgggccagggcgtgggaggattccagcgccgggatgatcccttcgtgcaggcacagcgttttgaaggcttcaagggcttcatcatcggtaatagacacgtaatcagcgcgtccagtgctgttaagatacgcgtgttgtgggccgacagacgggaaatccagtccggcggagatggagtaagattcttcaatctgcccgtcttcggtttgcatcatcggcgctttcataccgaaatagatacccacgcgaccatgttttagcggtgcgccgtgctcgccagtttcgataccgtgaccacctggctccacaccaatcaggccgacgttggtttcattgatgaaatcagcaaacatgccgatggcattgctaccgccgccaacacaggcgataacggcatccggcaggcgaccttctctttccagaatctgcgctttggtttcttcgccaatcatccgctgaaactcacgcacaatggtcggataaggatgcgggccagctgcggtgcccagcatatagtgcgcggtttcgtaactaccggaccagtcgcgcagcgcctcgttacaggcatctttcagcgtcgcggaaccgctatgcaccgggatcacttccgcacccattaagcgcatacgaaaaacgttagggctctggcgttcaacgtctttggcacccatataaatacggcatttcaggccgagcagggcgctggcaagggcgctcgccacgccatgctgaccggcaccggtttcggcgatgatttcggttttacccatccgcttcgccagcaacgcctgccccagcacctggttagttttatgcgcgccgccgtgcagcaaatcttcacgcttgagatacagcgtggtgttcgtcccggctgtaatgttctggcatttggtcagcgcggttggacgcccggcatagtttttcagcaggtcgttgaactgagcctgaaattcaggatctttttgcgcactgacaaaagcttcttccagctggcgcagagcaggcatcaggatttgtggcacgtacatgccgccaaactcaccaaaataggggttaagtaatgttgtcattgttcctttccttaatatgcgcgcagcgtctggaaaacgctggccaaaagacgtgcgtctttgatgcccggttggctctctacagcagaattaaaatcaagtccggcgcagccggtttgtgccgcttccacgcagttatctgcgcctaagccccccgccagcagaacgttgccaaggctttgaccatttaatagactccagtcaaaacgttgcccgcttccaccctggccgttgtctaaaacatatttatcaacgtgctgaaactcgcgggcgggcagggtttcaccgacgcttaatgctttccagatggcaacatgtgctggcagagcttcacgcagcgtatcgatatacagctgttcttcattaccatgcagttgcactgccgccaggcttaacaccttagctttgtccaccacatcggcaatatcgtgattgcggaacacgccaacatactgcaacggtgccgcagccatcacttcctgcgcctgttcaacgttgacgcaacgcggacttgtcgcaacaaaaatcaacccaccgtaaatcgcgcccgcgtcataagctgctttagcatcttgcccacgcgtcaggccacatactttattctcacccagcaacacccggcgcacggcggcgtgcaaatcgtcatgggccatcaacgcgctaccaatcagaaaaccgttagcgaagtggcttaactcgcgcacctgagcgtaagtattgatgccggattcgctgattaccgtcacgttgtgccccagtttcggcgcaagctcgcgggtacggttgagatcaatgctcaaatcacgcagatcgcggttgttgatgccaacgacctttgctcccaatgcaatggcgcgctcctgttcctcttcattactgacttcggtcagcacccccatctccagactgtgagcgacggcggcaagctggcgatattggtcgtcatccagtacactaagcattaataagcaggcatcggcctggtaatagcgcgccagatagatctggtaagggtcgataatgaagtctttacataaaatcggctgcggggcgatttggctgacgatggggaggaaattaaagctcccctgaaaatatttctcatcagtcagcacgctaattgcgctagcgtaatgtttataaatggcggcaatgcgtgctggatcgaaatcatcacggatcacgcctttactcgggctcgctttcttgcactccagaataaacgccgtgcgcgcaccctgtagcgcatcataaaaatgtcgcgtgctcggctgaacctcattctgaaaactggccagcggttgctgctgtttgcgggcttctacccaaatcgccttgtctgcgacgattttcgctaaaacggtttgcatcatttaccctcgtgccgccagtgcggtgactctgtcgtaagcggaaccactgcgcagtacctcaagaacggtttgcgcattggcttgcagatcttcatggccatgcaggcgcattaacatggcgacgttcgcagcgacggctgcttcatgggcggcgtcgcctttaccttgtaacaaacgtgttaaaatgtcacggttttcttccggtgttccgcctgccagttgctcctggtggtagggtgtcaggccaaagtcttctgcggtgagctgatagcttttaatttcgccgtcatgcagttcggcaacgattgtcggcgcgtgtaaactaacttcatccatcccgccgctgtgcaccaccgccgcgcgttgataccccagcacgcgcaaggtttcggcaatcggcagcaccagttccggactataaacaccaattaacgccagcggcggatgcgccgggttaatcaatggccccagcacattgaacagggtgcgggttttcagttgctggcgaaccggcatcgcgtggcggaatccggtgtgatacttcggcgcaaagaggaaacatacacctaactcatccagcgcctggcggcttttatcggcgttcatatcaagattaataccgaacgccgccagcagatcggagctaccagatttactggagacgctacggttgccgtgtttcgccactttcagcccacaggccgcggcgacaaacgcactggcggtagaaatattgatactgttgctgccgtcaccgccagtaccgacgatatcagcaaacagataatccgggcgcgggaacggcgctgcgttttccagtagcgcggttgctgccccggcgatctcgttcgggtgctcaccgcgaattttcatgctcaccagcgccgccgccagttgttccggcttcagctcgccacgcaccaccgcactaaacagctggtggctttcttgttggctaagcgtctgcgcctgatacagtttttccagaatcggttgcagcgtgttggctggctctagtttctgctgcgcccaggccagcgtttgttccagcaggcgagcgccctgggtggtgagaatggattccggatggaactggaatccacaaacgcgatccgcatcgtgacgtactgccatcaccatgccattaaaatgggcgttgatggttaaaccggccggaatgttactgccaaccaggctgtgataacgcgccaccggcagcgggtttgttaatccggcaaacatcgcctgaccgtcatgttcaatgctggaggctttaccgtggagaatttcgcccgcctgaccgacatagcccccgtaagcttcgacaatcgcctgatgtccgaggcaaatgccaataatgggcagcttgccacgcaagcgggtgaggagttccggcatacaaccggcttcgctcggcacaccggggccaggagaaagcatcagcaccggattgctcatggtcgccaggcgttcaattaaggtttgcgccggaatatggttgcggtaaatcaccacgttatgcccattgctgcgcaactgatctgccaggttgtacgtaaaagagtcgatattatcgagcagcagaatgtcagccatcagaaagtctcctgtgcatgatgcgcggtggcaatagcgcgcagtacagcgcgggctttgttacgggtttcgtcggcttcgctctgcggaacagaatcaaggactacaccagcacccgcttgcacggtggcgataccgttttccaccagcgcgctgcggatcacaatgcaggtgtcgagatcgccatgcgcggtgaaataacctaccgcgccgccgtagctgccgcggcgacgaccttccgcctcggcaattaactgcatagcgcgtactttcggcgcaccgcttaacgtccccatattcatacaggcgcgataagcgtgcagggcgtcaagatcgtgacgcagttcgccgactacgcgagagacgaggtgcatcacataggaataacggtcaactttggtgagatcggcgacgtagcggctgccgggggtgcaaatgcgtgccagatcattacgggcgagatcaaccagcatcagatgttcagacagctctttatgatcggtacgcatttccagttcaatacggctgtcgagatctctgtccagactaccatcggcgcgacgaccgcgtgggcgtgttccggcaatcgggtagatctcaatctggcggctggtggcatcatacttgaggctgctttccgggctcgcgccaaatagggtgaaatcattatcctgcataaaaaacatgtacgggctgggattactctttttcagcacgtaataggccgccagcggactcgggcagggcagagagaaacggcgagatggcaccacctggaaaatttctccagcgcgaatcgctttttgcaacaaacgcactacgccaccgaactcttcatcgctctgattacattcacaacgcatatgcggcacggaaaccactggcagcggcggcgcggcttcggtcagttgctgacgtagttcgttcaggcgagcagtgagacgttgtttttcttcttcattcggagcaaacaggctggcctgaatacgggtgctttttttctgatggtcaatcaccatcagcgtttcagcgagataaaaacagaaatcagggcagttattttccgcactcagttgcggtaaatcttcaaatcccgccacaaggtcataagagaacaggccgccgaagaacatggcttctcgttcttccttcggtacattcaacagattctgcaataaacggaaagcgtcaaaaacgctaagggagcataagcgggcgtcttcatccagcagtggactgacaggggggaagcgcagcacacggcagtttggactttgttcactttccacacccgcaggcagggcgttatccagtagtgccaggagggcttcgccgttgccggaaagtgcctggattgtgacagtgtcacctaaagctgtaatgcgcagcgcactgtctaccagcagcaggctttttaaatcatctttgctgtcgatatctgcggattccagcagcagcgttgccggacgatccccacacaactggtgaaaaagcgcggtgggattgtcgcgataagcgccttcgcaggttagcagttcgagagtcggtttttgtgtttgcattgttattctctaattttgttcaaaaaaaagcccgctcattaggcgggctgggtatctgattgctttacgcatggtgaatacactgcccgtttcaggaagtgcgccaccaacctttcagtacgaaaattgctttcattgtcgataccctttttacgtgaacttgcgtactagttaactagttcgatgattaattgtcaacagctcatttcagaatatttgccagaaccgttatgatgtcggcgcaaaaaacattatccagaacgggagtgcgccttgagcgacacgaattatgcagtgatttacgacctgcacagccataccacagcttccgatggctgcctgacgccagaagcattggtgcaccgtgcagtcgagatgcgcgtcggcaccctggcgatcaccgaccatgacaccacagctgcaatcgcgccagcaagagaggaaattagtcgtagcggactggcgttgaatcttattcccggcgtggaaatttccacggtctgggaaaatcatgaaattcatattgtcgggctgaatattgatattactcatccgctaatgtgtgagttcctcgcgcagcagacagaacggcgcaatcagcgggcgcagctgattgccgaaagacttgaaaaagcgcaaatacctggggcgctggaaggcgcacaacgactggcgcagggcggcgcagtgacgcgcggtcattttgcgcgtttccttgttgagtgcggcaaagccagtagtatggcggatgtctttaaaaagtatctggcgcgcgggaaaaccggatacgttccgccacagtggtgtacaatagaacaagctattgatgtcattcatcattctggcggtaaggcggtgctagctcatcctgggcggtacaatcttagtgctaaatggctgaaaagattggttgcgcattttgccgaacaccacggtgacgcgatggaagtcgcgcagtgccagcaaagccccaatgaacgtacccagctggcggcccttgcgcgtcagcatcatttatgggcaagtcaaggatctgattttcatcagccatgcccgtggatcgaactgggtcgtaaactctggctgcccgcaggcgttgaaggcgtctggcagctatgggaacagccgcagaacaccacagagagggaattatgagccagtttttttatattcatcctgataacccacagcaacgtctgatcaaccaggcggtggagatcgtgcgtaaaggcggggtgattgtttatccaactgattccggctatgcgctcggctgtaaaattgaagataaaaacgcgatggagcgtatttgtcgtattcgccagctgccggacggtcacaactttaccctgatgtgtcgcgatctttctgaactcagcacctatagttttgttgataacgttgcgtttcgtttaatgaaaaacaacacgccgggcaactataccttcatcctgaaggggacgaaggaagtgccacgccgtctgttgcaggaaaaacgcaaaaccatcggtatgcgtgtgccttctaaccctatcgctcaggcgttacttgaagcattgggcgaaccgatgctttccactagcctaatgctgccaggcagcgaatttaccgaaagcgacccggaagaaattaaagatcgtctggaaaaacaggtagatttgattattcacggcggctatctcgggcagaaaccgacaacggttattgatcttaccgatgatacgccggtcgtggtgcgtgaaggcgtaggtgatgtgaagcctttcttataacaaattgcgttccacggatggaagactatggcagggaagtttcgctgcattttgctgttgatagcagggctgtttgtaagttctctaagttatgcagaaaacacggagatcccttcttatgaagaagggatcagcctctttgatgttgaagccactctgcaaccagatggggtgctcgacatcaaagaaaatattcattttcaggcgcgaaatcagcagattaagcacggcttttatcgtgatttaccacgactatggatgcagcctgatggggacgctgcactgctgaactatcatattgttggcgtcacccgtgatggtattcctgaaccctggcatcttgactggcatatcgggttaatgagtattgtcgtgggcgataaacaacgtttcttgcctcaaggcgactatcattatcaaattcattatcaggttaaaaatgctttcctgcgtgagggggattctgatctgctaatctggaacgtgaccggtaaccactggccgtttgaaatttataagacccgtttttctctccagttctctaatattgcgggtaatccatttagcgaaatcgatctttttaccggagaagagggcgacacatatcgtaatggccgcatccttgaggacggaagaattgaatcccgcgatccgttttatcgtgaagatttcacggtcctctaccgctggcctcacgctttacttagcaatgccagcgctccgcaaacgacgaatattttcagccatcttcttttaccctccacgagtagcttgttaatttggtttccgtgtctgttcctggtttgtggatggttatatctctggaagcgcaggccgcaatttacgccggtagatgtgattgaaaccgatgtcattccgccagattacacgcccggcatgttacgtctcgatgcgaagctagtttacgacgataaaggtttttgtgccgatatcgtaaatctgattgtgaaaggaaaaattcatctggaagatcagtctgacaagaaccagcaaatcctgattcgtgttaatgaaggcgcgaccagaaataatgcggtattactgcccgcagagcagttattactggaagcgttatttcgtaaaggcgataaggtcgttcttacggggagacgcaacagagtcttacgcagggcatttttacggatgcagaaattttatctgccgcgtaaaaagtctagcttttaccggtctgatacttttttgcaatggggtggactggcaatattggcggtcattctttacggtaacttgagtcctgtaggctgggcaggaatgagtctggtgggcgatatgtttattatgatctgctggattattccttttttattttgttcccttgagcttttgtttgcccgcgatgatgacaagccttgcgttaatcgtgtaatcatcactttgtttttaccactgatttgtagtggcgtggccttctattctctctacatcaatgtcggagatgtattcttttactggtatatgccagcgggttattttaccgctgtttgcctgaccggttatctcactggcatggggtatatttttctgccaaagtttacccaaactggacagcaacgttatgcccacggtgaagctatcgttaactatcttgcgcgtaaagaggcagcaacacacagtggacgtcggcggaaaggggaaacacggaaactggattacgcgttgctaggttgggctataagcgcaaatttggggagggaatgggcgttacgcattgcccctagcctttctagcgcgattcgcgctccagagattgcccgtaacggcgttttattcagtttacagacgcacctaagttgcggggccaataccagtttgttggggcgaagttattccggtggtggtgctggcggcggcgcgggtggcggaggcggtggtggctggtaattaagctgatgttaatcgaaacaagctttaaccataaagatagtgtagtatgttgcgcctcaaagccaggccgataaacgtcgagtcgtttacttaaggcctgaagagttcaaacagactttactatcagtgagtcagatgtaagttctgactcactgttgcacaaaagcatatcagacgcctgggaaggcgacaccaaaaggaagctctatgagcgaaaagctacagaaagtgctggcgcgtgccggccacggttctcgccgtgaaatcgaatctattattgaagccggtcgtgtgagtgttgatggcaaaattgctaaactcggcgatcgtgttgaagttacccctggattgaaaatccgtatcgatggtcacctgattagcgtacgtgagtccgctgaacaaatttgtcgcgttctggcctattacaaaccggaaggtgagttgtgtacccgtaacgatccggaaggacgtccaacggtgtttgaccgtctgccaaaactgcgtggcgcacgctggattgccgtgggtcgcttggacgttaatacctgtggtctgctgctgttcaccaccgatggtgaactggcaaaccgtttaatgcacccaagccgtgaagttgaacgtgaatatgccgtgcgtgtatttggtcaggttgacgacgcgaaactgcgtgatttgagtcgtggcgtgcagttggaagatggtccggcagcttttaaaaccatcaagttcagcggcggcgaagggatcaaccagtggtacaacgtgactctgaccgaaggccgtaaccgtgaagttcgtcgtctgtgggaagcggttggtgtgcaggtgagccgcctgatccgtgttcgttacggtgatatcccactgccaaaaggtctgccacgcggtggctggacggagctggacctcgcccagactaactatctgcgcgaactggtggagctaccgccagaaaccagctctaaagtcgctgtagaaaaagaccgtcgtcgcatgaaggcgaatcagattcgtcgtgcggtgaaacgtcacagtcaggtgagcggcggtcgtcgttctggcggacgtaataataacggttaatcaaagtatgccggacgtcatatccggcatttttacagattaataatcgatccctatctgcgcttttacaccggcatcaaacgcatgtttgacggggcgtaattcacttaccgtatctgccagttcaagaatatcccgatgacaaccacgacccgtgataatcaccgtctgttgatgtggacgttcatttaacgcctgcaccacttcttccagtggcaaatagtcatacgccaccatatacgtcagttcatcaagcaaaaccatatccagactggaatcagcaagcatccgctttgcatgttgccagacttcgcggcaggcggcggtatcagactcgcggttttgtgtatcccaggtaaagcccgttgccatcacctgaaactcaacgccatgtggctccagcagattgcgttcgccattaggccaggtgcctttaataaactgcacgacgcctactttttttccgtgaccaactgcgcgtgttgccgtaccaaatgccgcggtggttttgccttttccattgccggtaaagacgatgataataccgcgttcatcctgggcctgggccacacgagcatctactttttctttcactcgctgctgacgctgttggtagcgttcatcactcattgggaaattcctggtttacggcccggttgggcgtcaaaggtcatgccggttttacggcggctgtcatcgcccatcagccagaggtagagcggcatgatatcagcgggtgttttaagtttctgtggatcttcggtcgggaaggcgctggcacgcattgcggtgcgcgtaccgcctgggttaatgcagttgacacgcaggcgctgctgatattcatcggccagtacctgcatcatcccttcggtggcaaatttgctcgctgcatatgcaccccagttggctcgtccctgacgtccaacgctactactagtaaagaccagactaccggcgtcgcttttgagtaataaaggaagcagtgcctgggtgagcataaaggtggcattaacgttgacctgcatgacgtcctgccagacctgcggattttgttcgctcattgggcaaacatcgccgagcaatccggcattatgcaaaacaccatccagacgcggataattaacggcaatgcgctgtgccagttgttggcaattttcggacgtgcaggtcagcaaatcgagaataaaccactgtggctgacgcccagtttcttcgtttatgtggctggctacctgacgtaatttttcttcattacggcccaacagaatcactgtcgcaccatagcgtgcatacgtcatcgcggcttcacgaccaataccatcgctggctcccgtcaccaggataatgcgatcattgagtaaatcttgttttggctggtaatgcatggctactcctcaacgacgttgtctgtcgcgctgccagtgtactttatgactttggggctttatgcctgaaacagaagggcatttcaatcagcctggggcgataacaccgcaaaatggatactttgtcatactttcgctgcaataacatctctgcgagacggcttaacatgcctgttgtaaactgtgagccaaagcgttgtttaaccaaggtggggactcgtggaattgttgtctgaatatggtttgtttttggcgaaaatcgttaccgttgtgctagcgattgcggcgattgccgccattattgtcaatgttgctcaacgtaataaacgccagcgtggcgagttacgggtcaacaatctcagcgaacagtataaggagatgaaagaagaactggccgcggcgctgatggacagtcatcagcaaaaacagtggcacaaagcgcagaagaaaaagcataagcaagaagcgaaagcagcaaaagcgaaagccaaactgggcgaggtggcaactgacagtaaaccccgcgtctgggtgctggattttaaaggcagcatggacgcccatgaagtgaacagcctacgtgaagagataacggctgtactcgcagcattcaaaccgcaggatcaggttgtgctccgtctggaaagccctggtggcatggtgcatggttacgggctggcggctagccaactgcagcgtctgcgcgataaaaacattcctttaactgttacggtagacaaagtcgctgccagcggcggttacatgatggcctgtgtggcggacaaaattgtttccgcaccgtttgctattgtgggttccattggcgtggtggcgcaaatgcccaactttaaccgcttcctgaaaagcaaagatattgatatcgaactgcacactgccgggcagtataagcgcacgctgacgttgctgggtgaaaataccgaagaagggcgggagaaattccgcgaagagttgaacgaaacgcatcagttgtttaaagattttgtgaagcgtatgcgtccttctctggatattgaacaggtggcaacgggtgaacactggtacggacaacaggcggtagagaaaggcctggttgatgaaatcaacaccagtgatgaagttattcttagcctgatggaaggccgtgaagtggtcaatgtacgctatatgcagcgtaaacgactcattgaccgattcaccggcagcgcggcagagagcgccgatcgattgttgctacgctggtggcagcggggtcaaaagccattgatgtaaaagacaaacgcgaggctaagacctcgcgttttgctttaatcaaccagatgatatttttcactaagcacatgggccaggtgtttgaacatattaaacaccgcggtgcttttggctgttggcaatccttgttcatctaaaaagtagtcgccggtaaataccagcacgccattacgctgcgtgacgccggtggcttcaatccctgcgagcgtatcctcatgctcacgaatgattttgttggcctctttcaacagcgtttcgcggtcgatgggttgtgtctctttgttcattatttactccttaaacaaggacattagtctacgccaggcatggcttgcagacaaatataccacgctggtggcaagagcgccttactggcaactttggattttgcatgctaataaagttgcgtatcggattttatcaggtacagtgtgacgctttcgtcaatctggcaatagatttgcttgacattcgaccaaaattccgtcgtgctatagcgcctgtaggccaagacctgttaactcagtcacctgaattttcgtgaacagagtcacgacaaggggttgatatccgcagagagcgagtccatatcggtaactcgttgccagtggaaggtttatcaacgtgcgacgcattcctggaagaatcaaattaggtaaggtgaatatgggtaaagctcttgtcatcgttgagtccccggcaaaagccaaaacgatcaacaagtatctgggtagtgactacgtggtgaaatccagcgtcggtcacatccgcgatttgccgaccagtggcagtgctgccaaaaagagtgccgactctacctccaccaagacggctaaaaagcctaaaaaggatgaacgtggcgctctcgtcaaccgtatgggggttgacccgtggcacaattgggaggcgcactatgaagtgttgcctggtaaagagaaggtcgtctctgaactgaaacaactggctgaaaaagccgaccacatctatctcgcaaccgaccttgaccgcgaaggggaagccattgcatggcacctgcgggaagtgattgggggtgatgatgcgcgctatagccgagtggtgtttaacgaaattactaaaaacgcgatccgccaggcatttaacaaaccgggtgagctgaatattgatcgtgttaatgcccagcaggcgcgtcgctttatggaccgcgtggtggggtatatggttagcccgctgctatggaaaaagatcgctcgtggcctgtctgccggtcgtgtgcagagcgtggcggttcgcctggtggtcgagcgtgagcgtgaaattaaagcgttcgtgccggaagagttctgggaagtcgatgccagcacgaccacgccatctggtgaagcgttggcgttacaggtgactcatcagaacgacaaaccgttccgtccggtcaacaaagaacaaactcaggctgcggtaagtctgctggaaaaagcgcgctacagcgtgctggaacgtgaagacaaaccgacaaccagtaaacctggcgctccttttattacctctacgctgcaacaagctgccagcacccgtcttggatttggcgtgaaaaaaaccatgatgatggcgcagcgtttgtatgaagcaggctatatcacttacatgcgtaccgactccactaacctgagtcaggacgcggtaaatatggttcgcggttatatcagcgataattttggtaagaaatatctgccggaaagtccgaatcagtacgccagcaaagaaaacagtcaggaagcgcacgaagcgattcgtccttctgacgtcaatgtgatggcggaaagcctgaaggatatggaagcagatgcgcagaaactgtaccagttaatctggcgtcagttcgttgcctgccagatgaccccagcgaaatatgactccacgacgctgaccgttggtgcgggcgatttccgcctgaaagcacgcggtcgtattttgcgttttgatggctggacaaaagtgatgcctgcgttgcgtaaaggcgatgaagatcgcatcttaccagcagttaataaaggcgatgctctgacgctcgttgaacttacaccagcccagcactttaccaagccgccagcccgtttcagtgaagcaagcctggttgaagagctggaaaaacgcggtatcggtcgtccgtctacctatgcgagcatcattagcaccattcaggatcgtggctacgtgcgagtagaaaatcgtcgtttctatgcggaaaaaatgggcgaaatcgtcaccgatcgccttgaagaaaatttccgcgagttaatgaactacgactttaccgcgcagatggaaaacagcctcgaccaggtggcaaatcacgaagcagagtggaaagctgtactggatcacttcttcagcgatttcacccagcagttagataaagctgaaaaagatccggaagagggtggtatgcgcccgaaccagatggttctgaccagcattgactgcccgacttgtggtcgcaaaatggggattcgcacagcgagcaccggggtattccttggctgttctggctatgcgctgccgccgaaagagcgttgcaaaaccaccattaacctggtgccggaaaacgaagtgctgaacgtgctggaaggcgaagatgctgaaaccaacgcgctgcgcgcaaaacgtcgttgcccgaaatgcggcacggcgatggacagctatctcatcgatccgaaacgtaagttgcatgtctgtggtaataacccaacctgcgacggttacgagatcgaagagggcgaattccgcattaaaggttatgacggcccgatcgttgagtgtgaaaaatgtggctctgaaatgcacctgaaaatggggcgtttcggtaaatacatggcctgcaccaacgaagagtgtaaaaacacacgtaagattttacgtaacggcgaagtggcaccaccgaaagaagatccggtgccattacctgagctgccgtgcgaaaaaagtgatgcttatttcgtgctgcgtgacggtgctgccggtgtgttcctggctgccaacactttcccgaaaagccgtgaaacgcgtgcgccactggtggaagagctttatcgcttccgcgaccgtctgccggaaaaactgcgttatctggccgatgcgccacagcaggatccggaaggtaataagaccatggttcgctttagccgtaaaaccaaacagcaatatgtctctagcgaaaaagacggaaaggcgactggctggagtgcattttatgttgatggcaaatgggttgaaggaaaaaataacctttaattctgtcaggtttttataaacaaagggtcgcgaaagcggcccttttttattgcatattattttttcttcacacctatacactaaggctataaatgatatagtggttatagttagcaccttttttattattaaatcgtattagtcacccgccaggtgtgacgaaaaaacgatgttctgatggcgtctaagtggatggtttaacatgaaattacaacaacttcgctatattgttgaggtggtcaatcataacctgaatgtcagtagtacagcggaaggactttacacaagtcaacccgggatcagtaaacaagtcagaatgctggaagacgagctaggcattcaaattttttcccgaagcggcaagcacctgacgcaggtaacgccagcagggcaagaaataattcgtatcgctcgcgaagtcctgagcaaagtcgatgccataaaaagcgttgccggagagcacacctggccggataaaggtagtctgtatatcgccaccacgcatacccaggcacgctacgcattaccaaacgtcatcaaaggctttattgagcgttatcctcgcgtttctttgcatatgcaccagggcagcccgacacaaattgctgatgccgtctctaaaggcaatgctgatttcgctatcgccacagaagcgctgcatctgtatgaagatttagtgatgttaccgtgctaccactggaatcgggctattgtagtcactccggatcacccgctggcaggcaaaaaagccattaccattgaagaactggcgcaatatccgttggtgacatataccttcggctttaccggacgtagtgaactggatactgcctttaatcgcgcagggttaacgccgcgtatcgttttcacggcaacggatgctgacgtcattaaaacttacgtccggttagggctgggggtaggggtcattgccagcatggcggtggatccggtcgccgatcccgaccttgtgcgtgttgatgctcacgatatcttcagccacagtacaaccaaaattggttttcgccgtagtactttcttgcgcagttatatgtatgatttcattcagcgttttgcaccgcatttaacgcgtgatgtcgttgatgcggctgtcgcattgcgctctaatgaagaaattgaggtcatgtttaaagatataaaactgccggaaaaataatttcttgcgttattttcggcaccttttatgtagcgaaggtgccggaatatattctcttttgttacttatttctataccgtgcacaatatttttatccctcatatttatagggtaaattacctgtaaagtagtgtctaattacccgcctcgcaaactccagttttcaaatatctatttcaggtcaaaagattgaattattcactggagacgattcgtaaattcgctggatttttgactaaagtttctttaggatttgtctcatcgtatgattaattacaccaatcgttcaacgtcttgctgataagtgatggcgattatatgaggttagcaatgccttctggaaatcaggaaccccgccgcgatcctgaattaaaacgtaaagcctggctggcggtttttcttggttctgcacttttctgggtggttgtcgcactgctgatttggaaagtgtggggataactatggtcggtcaggagcaactggagtcgtcaccattatgccagcatagtgacaatgaaacagaaacgaaacgggaatgttccgtcgttattccagacgactggcaactaacatcgcagcagcaagcctttatagaactgtttgctgaagatgatcagccgaaacaataattatcatcattcttattacccatttttaatgaattaaagggcttttaatacaccgcagcaataacagcttgagttatctcaacacaaaataataaccgttaagggtgtagcctatgatcaacacaaatatgaaatattggtcctggatgggcgcgttttctctgtcgatgctcttctgggccgaactcctctggatcattactcactgatccttgaccccgctgcggcggggttgtcatttgctttgccacaaggtttctcctcttttatcaatttgggttgttatcaaatcgttacgcgatgtttgtgttatctttaatattcaccctgaagagaatcagggcttcgcaaccctgtcattaaggaggagctatgagcagtaccctacgagaagccagtaaggacacgttgcaggccaaagataaaacttaccactactacagcctgccgcttgctgctaaaagtctgggcgatatcacccgtctacccaagagtctcaaagttttgctcgaaaacctgctgcgctggcaggatggtaacagcgttaccgaagaggatatccacgcgctggcaggatggctgaaaaatgcccatgctgaccgtgaaattgcctaccgcccggcaagggtgctgatgcaggactttaccggcgtacctgccgttgttgatctggcggcaatgcgcgaagcggttaaacgcctcggcggcgatactgcaaaggttaacccgctcagtccggtcgacctggtcattgaccacagcgtgaccgtcgatcgttttggtgatgatgaggcatttgaagaaaacgtacgcctggaaatggagcgcaaccacgaacgttatgtgttcctgaaatggggaaagcaagcgttcagtcggtttagcgtcgtgccgccaggcacaggcatttgccatcaggttaacctcgaatatctcggcaaagcagtgtggagtgaattgcaggacggtgaatggattgcttatccggatacactcgttggtactgacagccacaccaccatgatcaacggccttggcgtgctggggtggggcgttggtgggatcgaagcagaagccgcaatgttaggccagccggtttccatgcttatcccggatgtagtgggcttcaaacttaccggaaaattacgtgaaggtattaccgccacagacctggttctcactgttacccaaatgctgcgcaaacatggcgtggtggggaaattcgtcgaattttatggtgatggtctggatagtctaccgttggcggatcgcgccaccattgccaatatgagcccagaatatggtgccacctgtggcttcttcccaatcgatgctgtaaccctcgattacatgcgtttaagcgggcgcagcgaagatcaggtcgagttggtcgaaaaatatgccaaagcgcagggcatgtggcgtaacccgggcgatgaaccaatttttaccagtacgttagaactggatatgaatgacgttgaagcgagcctggcagggcctaaacgcccacaggatcgcgttgcactgcccgatgtaccaaaagcatttgccgccagtaacgaactggaagtgaatgccacgcataaagatcgccagccggtcgattatgttatgaacggacatcagtatcagttacctgatggcgctgtggtcattgctgcgataaccagctgcaccaacacctctaacccaagtgtgctgatggccgcaggcttgctggcgaaaaaagccgtaactctgggcctcaagcggcaaccatgggtcaaagcgagcctggcaccgggtagcaaagtcgtttctgattatctggcaaaagcgaaactgacaccgtatctcgacgaactggggtttaaccttgtgggatacggttgtaccacctgtattggtaactctgggccgctgcccgatcctatcgaaacggcaatcaaaaaaagcgatttaaccgtcggtgcggtgctgtccggcaaccgtaactttgaaggccgtatccatccgctggttaaaactaactggctggccagcccgccgctggtggttgcctatgcgctggcgggaaatatgaatatcaacctggcttctgagcctatcggccatgatcgcaaaggcgatccggtttatctgaaagatatctggccaagcgcacaagaaattgcccgtgcggtagaacaagtctccacagaaatgttccgcaaagagtacgcagaagtttttgaaggcacagcagagtggaagggaattaacgtcacacgatccgatacctacggttggcaggaggacagtacctatattcgcttaagccctttctttgatgaaatgcaggcaacaccagcaccagtggaagatattcacggtgcgcggatcctcgcaatgctgggggatagtgtcaccactgaccatatctctccggcgggcagtattaagcccgacagcccagcgggtcgatatctacaaggtcggggtgttgagcgaaaagactttaactcctacggtagccggcgtggtaaccatgaagtgatgatgcgcggcaccttcgccaatattcgcatccgtaatgaaatggtgcctggcgttgaagggggggtgacgcggcatttacctgacagcgacgtagtctctatttatgatgctgcgatgcgctataagcaggagcaaacgccgctggcggtgattgccgggaaagagtatggaagtggctccagtcgtgactgggcggcaaaaggtccgcgtctgcttggtattcgtgtggtgattgccgaaagctttgaacgaattcaccgtagcaatttaattggcatgggcatcctgccgctggaatttccgcaaggcgtaacgcgtaaaacgttagggctaaccggggaagagaagattgatattggcgatctgcaaaacctacaacccggcgcgacggttccggtgacgcttacgcgcgcggatggtagccaggaagtcgtaccctgccgttgtcgtatcgacaccgcgacggagttgacctactaccagaacgacggcattttgcattatgtcattcgtaatatgttgaagtaacaactatttgcttgccggttattttgcttccggcaagcaaatgaattacacaatgcaagagggttatttgttcagcaaatggcccattttctcggctttggtatcgagataatgttcgttattggggttacgacctacaatcaatggtacgcgttcaacaatattaatccctgcttcggtcagaatttcgacttttttcgggttattggttaacaagcggacttcattgacgccaaggagtttgaacatatcagcgcaaagagtgaagtcgcgctcatcagcggcgaagcctaactggtggttagcctctacggtatcgtaaccttgatcctgcagtgcgtaagcgcggattttattcagcagaccaatgttacgaccttcctgacggtgatacagcaaaataccacggccttcctcggcaatttgcgtcaatgccgcttcgagctggaagccacaatcgcagcgcaagctgaacagggcgtcaccggtcagacattcggaatggacgcgcgcaagtaccggggtatgcccggaaatatcgccatagactagcgcgacatgatcgtgtccggttgccagttcttcaaatcccaccatcaggaaatcgccccatggggttggcagtttggcttctgccacacgtttaagctgcatgaaattctccagataatgctggttctgtattggcttattttgccataacgagaaggggttcacctaatcacgacgcgtcgatcgttcacggaatggcacaaatctgtcaatttttcctggaactggcgttttcagttatgattgtgggacttatcaaaaaggagaggccatgcgtagcattgccagacgtaccgcagtgggagctgcactattgcttgtcatgccagtagccgtatggatttctggctggcgttggcaacctggagaacaaagttggctactaaaagcggctttttgggttactgaaactgtcacccagccctggggcgtcattacacatttgattttattcggctggtttctctggtgtctgcgttttcgcattaaggctgcctttgtattatttgccattctggcggccgcaatccttgtgggacaaggcgttaaatcctggatcaaagacaaagtccaggaaccacgaccttttgttatctggctggaaaaaacacatcatattccggttgatgagttctacactttaaagcgagcagaacgcggaaatctagtgaaagaacagttggctgaagagaaaaatatcccacaatatttgcgtagtcactggcagaaagagacggggtttgcctttccttccggtcacacgatgtttgctgccagttgggcactgctggccgttggtttgctgtggccgcgtcggcgaacgttaaccattgctatcttgctggtctgggcaacgggagtcatgggaagccgcctgctgctcgggatgcattggccacgcgatctggtagtagctacgttgattagctgggcgctggtggcggtggcaacgtggcttgcgcaacgaatttgtgggccattaacaccacctgcggaagaaaatcgcgaaatagcgcaacgagaacaagaaagttaacgctggttgattttccgaatttagcccttaaatcatcaacaatgcgtgtggatgccatttcgcagacggcgcgaaaatggtactttaaagggctattgcggtaagttgaccataatttattcgctctaaccacataacgggaagtaatgtgaaatatttactcattttcttactggtgttagcgatcttcgtgattagcgtcacgttgggtgcgcagaacgatcaacaggtgacgtttaattatctgttagcgcaaggggagtaccgtatttccacattgctggcggtattgtttgctgcggggtttgctatcggttggttgatttgtggcctgttctggctgcgagttcgtgtttccctggcgcgcgctgaacgtaaaataaagcgactggaaaaccagcttagtcccgcgactgacgtggctgtagtgccgcacagcagtgcggcgaaggaataactttctatgctggagttgttgtttctgcttttgcctgtagccgctgcctatggctggtatatgggccgcagaagtgcgcaacaaaacaagcaagatgaagccaaccgcttgagccgtgattacgtagcgggggttaacttcctgcttagtaatcaacaggataaagcggtagacctgtttctcgatatgcttaaagaggatacaggcaccgttgaagcccaccttacgctcggaaacctgttccgtagccgtggcgaagttgatcgcgctattcgcatccatcagaccctaatggaaagcgccagcctgacctatgaacagcgtctgttggcgattcaacaactggggcgtgattacatggccgccgggttatatgaccgcgcggaagacatgttcaatcagctgaccgatgaaactgacttccgcattggcgcgctgcaacagttgctacaaatctaccaggctaccagtgagtggcagaaagcaattgatgttgccgaacgcctggtgaagctgggtaaagataaacagcgcgtcgaaattgcccatttctactgtgagttagccctgcagcatatggccagcgacgatctcgatcgtgccatgaccttgctaaaaaaaggggcggcggcagataaaaacagcgcccgcgtatccataatgatgggacgcgtgtttatggcgaaaggagaatacgccaaagccgtcgaaagtctgcaacgcgtgatatcccaggacagagaactggtcagcgaaacgctggaaatgttgcaaacctgctatcagcagttgggtaaaactgccgaatgggcagaattcctgcagcgtgcggtggaagagaacaccggtgccgatgctgaattgatgcttgctgatatcatcgaagcgcgcgacggtagtgaggccgcacaggtctatattacgcgccagcttcagcgtcatccgaccatgcgtgtgttccataagttaatggattaccacttaaatgaagcggaagaagggcgtgccaaagagagcctgatggtgctgcgtgacatggttggcgagaaggtacgtagtaagcctcgttatcgttgccagaaatgtggttttaccgcatacaccctctactggcattgtccgtcttgtcgggcctggagtaccattaaaccgattcgcggtcttgatggcctgtaatttttaaaaaaaatccgactttagttacaacatactaattattaatgttccattgtgctccggcaacgacggcgcagaaaaagcctgccaggggagaaatcgcaactgttaattttttatttccacgggtagaatgctcgccgtttacctgtttcgcgccacttccggtgcccatcatcaagaaggtctggtcatgacgttaactgctagttcttcttcccgcgctgttacgaattctcctgtggttgttgcccttgattatcataatcgtgatgacgcgctggcctttgtcgacaagatcgacccacgcgattgtcgtctgaaggtcggcaaagagatgtttacattgtttgggccacagtttgtgcgcgaacttcaacagcgtggttttgatatctttcttgacctgaaattccacgatatccccaacactgcagcgcacgctgtcgctgctgcagctgacttaggcgtgtggatggtgaatgttcatgcctctggtggggcgcgtatgatgaccgcagcgcgtgaggcactggttccgtttggcaaagatgcaccgcttttgattgctgtgacagtgttgaccagcatggaagccagcgacctggtcgatcttggcatgacactgagtcctgcagattatgcagaacgtctggcggcactgacgcaaaaatgtggccttgatggtgtggtgtgttctgctcaggaagctgtgcgctttaaacaggtattcggtcaggagttcaaactggttacgccgggcattcgtccgcaggggagtgaagctggtgaccagcgccgcattatgacgccagaacaggcgttgagcgctggtgttgattatatggtgattggtcgcccggtaacgcaaagcgtagatccagcgcagacgctgaaagcgatcaacgcctctttacagcggagtgcatgatgagtgattccaacagccgtctggtctacagtacggaaaccggacgtattgatgagtccaaagcggcccctgtacgccctaaaggcgacggtgtggtgcgtattcagcgtcagaccagtggacgtaaaggtaagggcgtttgcctgattaccggtgtcgatctcgatgatgccgaactgacaaaacttgcagcggaactgaagaaaaaatgcggctgcggcggagcagttaaagatggagttattgaaatccagggcgataagcgtgatttattaaaaagtctacttgaagcgaaagggatgaaggtaaaactcgcaggcggttaacataaaaagccacggatatatccgtggctttcgaatattttactgtgcgtattattcagttatttcgtactgaacagaatcaagcgtattataattgcgagtcgataatcgacatttatttacgattatttaccgacctggtgaccaataacacctccgacagctgcaccacctaatgtacccaacgtactgccatcggtcagtactgcaccgcctaatgcccctgcacccgcgccgattgcggtgttgcggtcccgtttagaccagttagaacaggcactcagagacattgccaaagtaattgccagaacagccgcggtcatttttttgctcgttacaaacataatactctctcctgaatttatgattcacggaagtaagctctctataactataatagctaagaataagtctggtgaaattattccgtgaaatctgctcgcgcgcagggttatatcacgcaggtgataatgacttcctgttatatcgctgataataattttatatcttgagagtgttaataacaggtaaatagtcttaattatcaaccaggaatcatcttagagcggatgatttgccaaactgcaaatcatccgtagagaagggaaatggttaaatgtcaacgacgtgaatggtgagtttactgtgctcaagatgcatcagatcgctggcgcgtattttgctatcggtaatcacgcgattgaatcgctcaacgggaccgatggagtaactatgtacagcaccaaatttgctgctgtcagtcaggactatcgcttcgcactctttttccagcacggcattgaccacatcggtacgcatcatatcgcgaccggtaaatccagtttcaggttgccagccatcaataccaataaatgctttgctgaaatgcacctgttggatgcactggcgtgtcaaagggccaaccatactttcgctttttttctgatacacgccaccgagcaaaataacttcacaaggcgcgtctttcagcaaatgcgcgatgtagctgctgaccgtgatgatagtgacatttttcttctgctcgcccagagtccgggcgagtagggcattgctgctgccattttcgataaagatggtttcgcccggttgaaccaggctcgcggcaaactcggcgagttcacgcttcagcgtatagttgctcatcatacgggtttcgacgtcatcactatcaaggctaacagcaaagccatgtgcacggcggaggtaactcagtttttcgagtgtgttgagatcctggcgaatggtaacttcagaaactccagtggcttttgccagatcggttacgctaacctgaccctggtcaatgaccatctgtagaatagtttgttgtcgggaattcatcgctgtaattcttataacgttataatacttaataaaaaaatactgacgcgccgggcatcctcaaataggaaaacctgaaggcacgattgttaaatctcccacggtgccttcgggatgtctggcgtagattcagcaacctggcgcaagagttctgctttaagtatctcgagattatggatcgcagagtggtaatcgcctgccacaaggatatctaacacaatatcaatacgttcggcaacgcgctgggcatcaaattcagacatcaaggacatccttatagcaaaagggggaaaatgaataatgcaaaaattgccgctaaaagagaagtgtttaacagcaacggctaattatcatccaggaatacgatatataatgacgggatatagcgctaagtatatatattcatctacttatgcgcgcttcagatagcgtttataccagcgttcgaaggcgacggcgggcatcggtttggcaaacaaaaatccttgccgctcattgatcccgttcttggttaaaaaagcatcttcctttgcactctctacaccttcggcgatcacctgaagattcaatgcctgggccacagcgacgatcgcccggaccagactctggctgacaggttgtttgtgaatatctcgaacaaaaacctggtcaagtttgatggcatcgatcggaaagcgcgccagttggctaagactagagtagccggtaccaaaatcatccagatgcacttgcgcacctagttggctaaattgttgaataacagacagtgccagttcatcattctcaatcagacaactctctgtcagttcaacatctatagggcagtattcaaaattgagttcctggagaacctgtttcagggcggtgaaaatggtttgatcggcgagctgacgtgcagaaatatttaccgccactcgcaggtttatgcctttatcccgccactttgccacctggcgtacgacatcgagaatcacccaacggcctaaaggcacaattagcccactctcttcggcgtaggaaatgaagtccaacggtggaatcaacccacgttcaggactctgccaacgtactagtgcttccagactgcgcacttcgccacgccaggtgattttcggttgatagtgaataaccaactgatcgttttccagtgctttacgcaagttggtatccagccagagatattcaaatacccgttgattcatttctggggtaaaaacgcaaaattgtcctcgtccgccttccttcgctgtgtacattgctgtgtcggcgtgacgaataatagccgtgctgtcactaccatgttcgggagagagtgcaatacctacactacagctggtataaacttcaattaaaccaatgcgaaaggggagccgtaagcgggtcaaaattcgacttgccattgcttccagcgcgctttgactggtgttggatgccagtaccagaaactcatccccacctggacgagccaacacctggtcatgttcgagacagcttaaaatagccaaactcacgtcgcgtaataactggtcaccaaacaaatgcccataggcgtcgttgacctttttgaaattatccaaatcaagatacacaaccccaactttattgttatctgcatgattaatagcgtgatcgattaaatcctgcattgcgttacgattcggcagtccggtgatactgtcggtatttgccagaatacgcagtcgctcctgagcgcggcgctcttcggtaatgtcggtgccggaacagattaaaaaaatctcgtttttgccactgccgctgtggacaaatttattgcgaaacagaaacagccgctggcctttacatgttggtatccacagttcgacttcatatgcattgccgcttcgaaaaaatacacggttattgcgcctggatgccgcagcttcacgacggctcataaacagtttaaacacgctttgcccaatgacgtcgtgttctttcaaccctgtgtaatcttcacataaccgattgaagcgttggatattcccccggctgtcgagaatcactattgcggaatatgcttcagaaactacctgctcagcaaaggaaagcccgtgacttaaatcacgagcaaccgccggtgtgtcatgccatgcagacgcgttgccagcccattcccgtttattgatttttcgtcctaccagatgcacagaaagatcgctttcatcgacggtcagactcatcatcaggctggaggtgatggccgtcatttccctgatgcgagcagcctgttcggcagataactgcaatgtacgatcaggttctgtggtttcggtggtagaaaagcgcaaaacatcgctgctttccgtcaaccgccagtatggattgtggcttccgagaaagttgtacaacgttgtggactccctaacggttttcatgatgcatatcctccggttaacagcggagtccgcggttaaataaaaggaacaacatgacttacatgaaattaacggcggctaaacgcattgttttttttatatatttatttgtaatccagttttggaaaaacgccagttttcaaacgaaagtcagttaaaaaatctgcctggatataacgaaggtagagcggggaaataaacggcccatccatgaggaatgggccgtgaaaggagattacgcgaccgggcgcgcaataatgctgcgggtttccatgcggacttcggcaatagtgacgtcaataacgtcagtcactttgtaaaccgtttcacctttaatttgtacagtgccgttttcctggctgcaaaccagttcatcgcgcacagcgtgtaagaaaggtgccggaataaaggcgatagcgccgttatcaaccaaacgaacacgcatgccgccacggctgatatcgacaatttccgctgcgaaacgggtgtcggtcccggctttgtctttcaggaagcgtgcgtataaccagtcaccaacatcacgttctgccatccggttgagacggcgacgctcggccatttggacagtgatttcatcctgtgggcgcgtcgcagtttcgcctttgataaccgctttcagcagacggtggttgatcatgtcgccatatttacggatcgggctagtccaggtggcgtatgcttccagaccgaggccaaagtgaggaccgggttcagtgctaatttcagcaaaactctggaagcgacgaatgcggctgtcgaggaaaccagttggttgcgcgtccagttcacgacgcagtttgcagaaaccgtccagcgtgagcacttcttcggcatcgacatgcagaccgtgcgttttcagcaacgctgccagcgcgtcggcattcgccggatcaaagcccatatgcacgttatagatgccaaaaccgagcttatcgcgcagtacgcgggccgcacaaatgttagcggcaatcatcgcttcttcgacgatacggttggcaatgcgacgaggctcggcgacgatatccagcacttcacctttttcaccgagaataaagcggtaatccgggcgatctttaaacaccagtgcgtggttatgacgccactcgccgcggcgttggcaaatttgcgctagcaaacggacttgttcggcaattgcttcactttcaggctgccagtcaccggtattttccagccagtcagaaacctggtcatacaccagctttgctttggattcgatggtggcggcaaagaattcgatattatcttcaatggtgccatcagcggagagcgtcatgcggcatgccagtaccgggcggacttcattggcgcgcagactgcagagatcgtcagaaagctcgcgaggcagcatagggatgttgaagccaggcagatagttggtgaatgcgcgaattttcgcggctttgtccagcttgctgccttcagcaatccacgcggttggatcggcaatcgccacaatcagctgaagtttgtcatccggcaacgccttagcgaaaagggcgtcatccatatcttctgtgctggcactgtcgatggtgacaaaatccagcgcggtcagatcttcacgaaccagaccttcatcgagcatttcggtagcgacgccgtctggtgcttctttttccagattatggcgtgcaagggtaacccaccacggtacaaagtgatcgtcaccaaaagtgatgtattgtgtcagttctgcatagaaagaacgatcgcctttcagcggatgacggcgcatttcggcaaccgcccagtcgccttctttaaactcgtggttcaggccacgggctgcgcggcaaggaatggcgtcttttaagagtggatgatcaggaacgatggccagacggtcatttttgccctgaaccttacccacgaaacgagtcaggaacggttcaaccagttcttctggctctgcggattcacgttctttttcactgtggatcaccgcgataattcggtcgccatgcatgacttttttcatctgcggcggcggaatgaaataacttttttgcgcgtcgacttccaggaagccaaagcctttttctgtggcttttaccaccccttcagcgcgtggcgtctgggaatgcagttgctgtttaagctgcgctagcagcgggttgtcctgaaacataattgtctattttggtggccattagagcggctgacagttttacgcgaatctgtctgacgcggcaaggttaatatgtctcacccaacgcgatttttaagcgatttatccagccacacagcccgctccataccagcagattaataatctgcgtactacttttttcgtgttcgagtaaagggctgaactgggcggcgctaaagcgatcgggtgctcgggtcagccattgtatcgcctgaacggtagcgcgctcaacagaatgacggtcagcccattggttaatttcattttcgcccttgcgcataagggtgctgatttttttatattcattactactatccatacaggtggcaaaacaagcaggactgccatttatacgcgcgcataacaacgccgcaagctgattatccggctgtgtattgccccgtgtgctgtttaacaacttttcgagaagggaaagactaatagggtggagagagagtatttcggccagttggcaaagttctgcagtactactttttgtgtgctcttcaggtagtttttccacctcatagctgcttcgccagcgtaaactttcatcagcaaacagactcgcgtcggcgtagttttgtatctccagcccgggtaaccagcgtaccggatgcccgagataagcctgaaatgtcgcaattgtccgcgcctgaaagccaataaaaccaatgatttggctaatgatcacacagtcccaggcagtaagaccgacgtcattcagatgctggcggcttcggttgtcgataatagaagggctgctagccagttggcgggcatattgcgtgatttgtgccaaccgatgattactttccctggtggaatcaggcccggggagcggcgtaagtcgcgcgctatagtagttacataaccgctggacgccgcaaacctgagcaaccgtcagggccgtgctcaagcgttcataagcggtgaaggtctgactacgggtcacggtaagctggtcagggaacaaatccactgcaagaacacgcgcagggtccagccaactaaggaagggggccagcgtttctttttcaaggatcacgtcgagtagaaagggatcgctgacctttgcggcttccgggaccagaggcagaacgtcatactccgtagtactggattgcgtttcatgataccagtggcttttgccggtgatgtggcgttgttccatgggcgctccttggtcgtaaaggaaatcgttatcctgacgcaaggcgggaaggggagaaagacggatcggcgataacaaatatcagaaaggtataacagagataacgggcggcagaacgccgcccatctttaccaacagaacgattatttcagttcgagttcgttcattgcagcaatgctgaaaccgccgtcaacgtggaccacttcaccggagataccggcagagagatcggagcacaggaatgccgcagagttacccacatcttcaatagtaacggtacggcgaatcggggtaacggcttcgcaatgagccagcattttgcggaagtctttgataccggaggccgccagagtacggatcggaccagcagagatggcgttaacacgcacaccttccggacccatcgcgttcgccatatagcgcacgttcgcttccagagacgcttttgccagacccataacgttgtagttcgggatagcgcgctcagcgccaaggtaggaaagggtcagcagggcagaacccggattcagcatggagcggcaagcttttgccattgcaacgaagctgtaggagctgatgtcgtgggcaattttgaagccttcacgggtaacggcgttaacatagtcaccatccagctgatcgccaggtgcaaaaccaatagagtgtacgaaaccgtcaaatttcggccaaactttccccagttcagcgaacatggtgtcgatgctggcatcttctgcaacatcgcactgcagaacgatgtcagaacccaattgagcggcaaattcttctacgcggcctttcagtttgtcgttctggtaggtgaatgccagttcagctccttcgcggtgcatcgcctgagcgataccgtaggcgatggatagtttgctggcaacaccggttaccagaatgcgcttaccggaaagaaaacccatagctttaatccttattgttgatgcttgttgtgcctgaaaatcaggcgattcgtcgttttagtaaacagtacgaacagataaacggttattataatcaacctggctgtgagtagctatagttgccaggtccgaccggagcaggctgcggcagggggggcgcttttcccctcaccctaaccctctccccagaggggcgaggggaccgtattgtgcaaatattgttaccccagcaacaaacaggctcatacagcccctaaccctttcatggcgatggctgggacggttcagaccttgccgaatattctccagcaccgtctccatgttttcaccacaacagctattcggctcggtctgccccctcgctctttcagggagagggactccggcggttcagttcctgcagaatattctccagcaccgtctcctcattacaatcaatctcgttattccagaaacgcagcacggtccagccctggctctcaagccagctagtgcgcctggaatcataggcaactgctaaatcatgctgcccaccatccagctcaacgactacacgcgcgctgcagcaagcaaaatcgagaatgtagctccccactggatgttgacggcgaaatttgaaatcactaaaacgtcggctgcgaagatatcgccagagctttcgttcctgcaaagtgagattgcgtcttaaatcacgcgcattacttttaattttatctatcacctcattctgacaagatttaatcttttgtcagaatgaggtgaataatctggaaggaggattcagaaaattagcgatctttacgccacgcatccgccgtcaatgcctcgccaaaatgaccggcaatcagccgtttggtgagttcatgcagcgggcttgccagcacatccgcggtgctgcctcgctcgacaacctcgccctgatgcatcaccagcacctggtcgctaatgtgcttcatcattccgatatgctgggtaacataaatatagctaatgccctgtttttcctgtaattccagcatcagattaatcaactggctacgcatgctcatatccagactagcgagggcttcatcggcaataatgacttttgggcgcaatatcagcgcgcgcgccagacccagacgctgtttttgtccgggtgccaacatatgcggatagtaactgacgtgatccggtagcagcccaaccatacgcatcgtttcaataatctgtttgcgacgctgttccggttccaggtcggtgttcaggcgcagtggaaaatccagaatttggctgatacgttgacggggattcaagctggtgctaggatcctgaaaaatcatgcgaatacgctgactgcggaaggaataatcgccaaaatgcagtggatgatcgtcaatcaataactcgccgctggtaggctctatcattcccgccagcatttttgccagcgtggatttaccgctaccattctcgccaataatcgccagtgtctggccttcacgtagcgtaaagctcaagggttttaccgcttctacggtctgacgacgaaaccagccggtccggtagcggaacgttttacttaaattacgcacttcaagcagcgtttcgatcatctcactctttctccatgttcagcgggaaatgacaggcatagagatgatttttcgcccccgtcaaacgtggcgtcacaatgcattctcgttgtgcatacgggcaacgtggccccagacgacaaccaatcggtaactgttccagcagtgggatagcgccgggcagcgtattgaggcgacttttatgcggcatcgcgctgccgaagtctggtatcgcgcggatcagcgcctgggtataaggatgatgtggcatcgtcaccaactccttactcggcgcggtttccactgtttgaccgcagtaaagcacgttaattttatccgcccattggctaagcatttgtaagtcatggctgataagcaaaatagtggtattgctgttttggttgagacgcgtcagcaggcgaaagatttgcgcctgggttgttggctccatactgttggtcggttcgtcagcaatcagcagacgcggttgattcgccagtgcaatggctatcatcactttctgacattcaccttcggtcaactcatagggaaaactgcgcatcgcatctttgtgatctttaatccccacgcggtgcagcagttcaatggcacggcgtttgcgccagccaaaacgctgccaccaacggcctttataggtccaggctgggatgttttgcatcaactggcggcccacacgttcactagggtcaagacagctctgcggttcctggaaaatcatgctcacgttatggccaaccagtttgcgccgttcgcgtgcggagagacgcagcaaatcgatatcatcaaaacgcatacggtcagcagtaacacgccagttatctttattcaccccacaaatcgctttcgcaatcaaactcttgccggaaccggattcaccaacaagaccgcggatttcaccttcggttaaggtcatacttacccggtcgacggctttaacccactcatcaccggttttaaattcaatggtcaggttacgaatatcgagtaatggcattattccacccccgcaataatcgcacgacgaacgccatcgccaaggaggttaaccaacaacacgctaatcataattgccgcacctggcagcatgacagtccacggggcgacataaatcagttccagcgcatcaccgagcatcgctccccattcagggctggggagttgtgcgccgagatcgagaaagcccagcgcggcgatatcgagaattgccatgctcagtgcgcgggtgatctcggtgaccagcccggcggtgatgtttggcatcacagcaaaccagagaatattcagcgtacttgcgccatccagacgggcggcgataacgtactctttttccagttcgtcatgcaccatgctgtaaatgctacgtaccatacgcggcagcaatgccagccagacagcaaacatagcgtgggacaaactcggtccggcaaacgctacaacgataattgccaacagcaggctagggatcgccagtaaggtatccagaatatggttaagcaccgcactgcggaggccgtgtgtcgccccggcgaaggtgcccagtaccaggccacagatcgtcgcggcaagcgtcaccacaaatgcgccacccacggttggcgcagctccgctcagtaaacggcttaaaacatcgcgtccgaggtcgtcagtccccaggaagaaagaaacttcgccatagcggctccaactcggcggcaataattgataaccgagaaattgctggtcgatgccgtaaggcgcaaaccagccgccaaaaatacacagtacagccagccccgcgcagccgtacaggccgaccatcgcagaggcgtcactataaaatttgcgccaggcggtacgcagcgtgcccggcgggcgcttttcgctgtatacgctatcgtaaggcataccattccttatgtttcagattatttatcgtaaggcataccattccttatgtttcagagggttagccatggcacccaaaatatcagaaatcacgttaacaataatgaccagactgccacacaccatcactccggcggaaatggctgcgtaatcctgctggcggatggcgttaattaaccagcgccctaaacccggccagctaaaaaccatttcggtgatcatcgccagcgtcagcatggtggaaaactgtaagcccaggcgaggaataaccggcggtaacgcgttatgcagaacgtggcgacgcaaaatagtaaagcggctcaaaccgcgggtcgccgccgcttttacatagttctggtcatacacttcgatagtgctgatacgcatcaggcggatcacttcagttgttggcgcaacgctcagggtgatcacgggcaatatcatatggcggattgcgctcatgatcatttcatcccgccatggactgtcgctaagccaggcatcaatcaacgcaaaaccggtaatcggtttcacttcgtagagcagatcgaaacgcccactaacgggcaaccaacctagcgtgagactacaaaacagcgtcaacagaagcgccagccagaacaccgggatactaaagcccagtaaggcgatggcgttgatcaagttatcctgccacttatggcgcgtaatcccggcaatcatccccacggggatgccaacaatcagcgcaaaaccgaaggcgaggatgcacagttccatcgtcgccgggaagacctcttttaactgttcggcaatcggttgaccgttaatgctggaaacaccaaaatcccagtggatcaggccgttaaaccagaacacccaggcattccacagactcgcgccttgtaacggcgcatgaggggtgaaatagctcaagctgaagccaacgaaggtcagcaggaacaaggtgacaatcaataacaaaatgcggcgtaaggtgaagataatcatggttttttcacctcatcctgtttctcgcgatacaccccagcaaaggaggcgttaccaaacgggctaagtaccagacctttgatatcgtaccgataggcctgcaaacgcaaactgctcgccagcggcaaaatgggcaattcctgcgccagaatactctgcgcttcgtcataggcttcaatacgcgccgccagctgctggctagagagcgccttacgcaatacgctgtcgaatttcggatcgcaccagtgggcgaggttggtctggctatgaattgccgcgcagctcagtaacggacggaagaaactgtccgggtcgttactgtccgtcgcccaaccggataacgtcagatcatggctcatatccatcaaccgcgcctcctgaaagcgaccttctaccggcacaatcaccacttttacgccaacctgcgccatatccgcctgaatcagttcggcagttttcagtggactggggttccacgcctggctacgtgtgggcacccacagtttcagcgttaaattttccagccccaagctcttcaactgttcgcggcttttcgccggattgtattcagtaattttagcctcgttgtcataggcccagctggcgcgcggtaaaatagaggccgccgtttcagccgtaccataatagatggattgcatcaggcgctggttattaatcgccagtgccagcgcatggcggacagcgggattatttagcggcggtttggcggtgttaaatgccagataggcgacgttcatcccaggacgcagcgttaaacgcaagcgcgggtcgtcacgcaaaatggatagctggctggcagcaggccaggccagaacgtcgcattccccggtcaggagtttgctcagacgtccggtgccgccggagcctaaatccaccactacctgcggcattaacggtttaccgcgccagaagtcatcatgacgttgtaggcgaataaattgcccggcgcggtattcgctcaactgatacggaccggtgccgaccggttgacggtcgagttgctcctggcgatcttctttctctaacttccgggcatattctgcgctcatgacgctagcataatgggttgcgaggtgccacaaaaaagaagcatccggctgggcgagtcggaactcaacggtatgattatccagtttgcggacgcttttcacgttatcggcaaattgcaggctgtcgaagtaggggaagttgctgccgttgacgttatgccacgggttgttgcggtcaaaaattcgctggaaggtaaacaccacatcgtcggcattcattttacgagtgggagtaaaccagtcggttttttgaaacggaacatcgcgacgcaggtggaagcgataggtcgcgccgttgtcgagtacttcccagctttcggcaagttccggcatcaggcgataggtatagggatcgacatccagcagtcgatcataaaactgggcggcaagggtatcgacaattaacccactgctcgctttggatgggttaaaggtgttgacttgcccgctgacgcaatagacaaaaccgctgtcgcggatatcagcatgcgggggagattcaggcgcggcgattgcctgaccactcacaagtccagcaatcaccaaaagagagcttaatacctggcgcataatattaagggattttatgtaaagaggctatcttactaatatttaatgacatttgccattaccgtttgtgttcaggggtcgtaatgagggccgtgtggttggtcgttgaacaggtgacgtcgccatctgttcaacattcgtacccgtgatttctctataactataactcacagaacaacttagcgaggagcagagcggtacgatcgtgagaaacccattaaagcacgctgcagtgcgtgtcattgttagccagatgcggcgtgaacgctttatccggacaacgatactgaccgatcgtctgcaattaaatcattactcattaccccattgattcaaaaactctgcgatctcatcaatgcgtacgggattaatccccgcttcagcagccatttcatgttgggcttcttcgctgatctcttcattgttcatcaaacgggtgagcagtaactggaagtagtgggccagcggtgtgcgttcagcctctgcgacaggctctgcgcattcggtcgcgtactcatcggcaatatcaaaatattttagcgggatatcgtggttcattatttgcccctggggttaatgcgctaagcataagggcggatgatagcactcgtgatccgggtcatacatctttttatagttaatggcgcggcgcgttaccctcaggcaggataatgcgccgcgcatccgactattacgtttcactcaccggcgttctgtcaccatcatacaacggcactttgcgatagcggcggatcagataccataaatatgcgccgcctaagctagcccataccagaccgagtgtcagactcgtactctcgaggttaacccacagcacacccaccgtcagcgcgccaaccagcggcatcagcaaatagtggaagtgatccttccagcttttattcattcctttacgccgccagaaatgattaaacacgctcagattcacgaaggtaaacgccaccagagcaccgaagttaattaacgctgtggcggtaactaaatcgaagaacagcgcgctcaacgcgacaatcccgaccataatgacgttgagtgccggagtccgccattttgggtgcacatagccaaacacgcgctccggaaacacattgtcacgccccatcacatacagcagacggctcacgctggcatgactagccaggccagaggctaacgtgttcacaaacgtggtgcagaggaaaatgctctggaagagcttgccgccgacgtacagcgcaatttcaggcagtgcggcatccggatctttaaagcggctgatatcgggaaagaacagctgcataaagaagctcgccgcgataaagataacgccaccgtagaccgccgtcaggaagatggctttcgggatcacgcgtgcggcgtccggcgtctcttcgctaagcgtggtcaccgcatcgaaaccgaggaaggagaaacagacaatcgtcgccccggtaataatcgggatcaggtgcgcgttctcgctgataaacggctgaagactccagacggtgccaacgccttctcctttatgcagtccctgaactaccaggaagataaacaccaccatgatggagatttgcaccagtacaaacagggtattgaagttagcgaccaggttgacgctcttcagattcgcggcggttaaaatggcgacgaaggttaccacccacacccacggcggcacttccgggaagagggcggagagatagattttcgccaacaagacgttaatcatcggcaaaaagagataatccagcaggctactccagccgaccataaatccgacgtgcgggttaatgctcttttgcgcgtaggtataggcgctaccggcctccggaaactggcgaaccagtttgccgtagctgatagcggtaaacagcacacccgccagcgccagcaaataggacgccggaacgtgaccgtcgctaatgccggagacaataccaaaagtatcaaatacggtcatcggcgtgagataggccagacccatcatcaccacctgccacaatttcagactttttcgcagacgggttttgccgggttgcgcagcaatattcagtggactattaatagccataattgctgcctcccctgcgtaataaggtttgcggtcgtgtcgacctgaaatcaaacctgtttagcaagggaagcaaagggggcggagtccagtcagtagcaggaggggcgcatacgcagcctccctcgccatgcggggatttaatcatcggcatcatctcatttcctcgtcacagtcttaatcgttaacggaagcccgttgccgcccgcgctccataacgcgacatccgggaaatgtctggattaccagcaaatgtcaggcctggctccgctcaggccgatgaaacaaccccgcaaggggtattacgcgtttttcaacatccactcaatttctgtttctgtgatgaggcgctcaaactgcaacagctcatcatttttacaggcgtgatagacatggcagaagcgttcgcctaaatagcggcgcaggtgatcattctcgataaactcacccagggcatcgctctggcgaatcggaaagggtaagccttcctgttccagcccgttgccttcgacttcttcctgcaacggcagctcgttatcaaggccatgcaaaataccggcaaaaatcgctgccatcaccagatatgggttggcatcggcacccgccacgcgatattccacgcggtgattatgacggtcgccgcacggaatacgcagggcgacggtgcggttgttatggccccagctcgcctgcgtcggcacatacattcccggctggaagcggcgatagctgttcacgtttggtgccagcaacgccatgctgctcggcatcaggtcaatcatcccggcgagcatctttttcagcagcgggctatcttcgccttccgcgtcagaaagcacgttctcgccacgattattttgcatactgatatggatatgcattccgctgcccgcgtgctcttcatacggcttcgccataaaagtggcgtgcatcttatgcttttctgccatcagacgcaccaggcgttttagtgccagcgcatcatcgcaggcttccagcacgttatcagtatggtaaaggttgatttcaaactgacccgggctggcctcagcgaccgcgccatctgccggaatcagctgtaactgcgccagttcatcaatatcattgagcacgtcggcgaagtggttgaggttatcaacggagtaaacctggctttgtgtattgcggtcatcggtgccaggcgcgcagggcggttgcagatacccttcagcgtcgcgctggcgatccagtaaatagaactccagctctaccgctacgaccgggaacaatccgcgctggcgcagctgctgccacaggcggttaagaacgttccgcggctcaacgtcaaagggagcgccatcttcatcgaccatggtcaggagcatctgaccgataaactctggatcggcggcagaaggagttaaggaaccgagaacaggaacacaggtacgatccggctcgcccatttcctgacccagacctgcttcttctactacgttgcccagaatatccattgcaaatacgctggccgggaaataacaccctttctcgagcttcttcaggctactaacaggaatacgctttccacggaagcaaccatttaaatcggtaagtaaaacatcaacatattgcgtattcgggtagcgctccaggtagcgtttcacttcctgcgtaaaggcgctaccccgcctctcttcactctgctgaacaaagttctctacttcaacgatattggtttccatgattcttcgcctttggtttgttttccgctcgttatcaaagcgtaaaatataatgaccaccattcgaatctgtatgcaaactaaatgtttgtcaaatgttaaattgagtttgcaaaaatgaaaacccactgctagattgaaaaaatattgaacataaaggtcatttaaagcgcagtaatggcgataatttagtccactttgtgagattgagcatggaaaatataatgaacaatccggttatcggtgtcgtaatgtgcaggaacaggcttaagggtcatgcgacccagactctgcaagaaaagtacctgaatgccatcatccatgcaggcggcttgcctattgcgctaccacatgcgctggcggaaccgagtttacttgaacaacttttgccgaaactcgatggcatttatcttcctggtagtcccagcaatgtgcagccgcacctatatggtgaaaacggcgatgagcctgacgccgatcccgggcgtgatcttctgagcatggcgataattaatgccgcactcgaaaggcgcatccccattttcgccatctgccggggtttacaagaactggtggtggcaaccggtggtagcttgcatcgcaagctgtgcgaacagcctgaattgctggaacatcgggaagatcccgaactgccggtggaacagcaatatgcaccgagccatgaagttcaggttgaagaggggggattactgtctgcgttgttacctgaatgtagcaacttttgggtaaactctctacatggacaaggggcgaaggtcgttagcccacggttgcgtgttgaagctcgcagcccggatggcttagttgaggcggttagcgtcatcaatcatccttttgcgctgggcgtacagtggcacccggaatggaacagtagcgagtacgcgcttagccgtatattgttcgagggctttatcaccgcttgtcagcaccatatcgctgaaaaacagcgactctgaccactacagtttaaggaaatgcaaatatgagtgatgagggactggcgccaggaaaacgcttgagcgaaatccgccagcagcaggggcttagtcaacgtcgtgccgccgaactctccgggctgactcacagtgctatcagtacgatagaacaagataaagtcagccctgccatcagtacgctgcaaaagctgctgaaggtgtatggtctgagtctcagcgaattcttttccgagccggaaaaacctgatgagccgcaggtcgtcattaatcaggacgacttaattgagatgggtagtcagggtgtgagtatgaagctggttcataacggtaacccgaatcgcacgctggcgatgatctttgaaacgtaccagccgggcacaaccactggggaaagaattaagcatcagggtgaggaaataggcactgtactggaaggtgaaattgttctgacgattaatggtcaggattaccacctcgtcgcggggcaaagttatgccattaataccggcatcccgcacagtttcagtaatacgagcgcaggtatttgccgaattatcagcgcccatacgcccaccacgttttaatctttttgttctgtaagccgggtaagcgcaatgcgcccggcaatctatacacaaaatcattcaagttgcatcaaggcggcaagtgagcgaatcccgatgagcttactcaggtaagtgattcgggggagcgaacgcagccaaggcagaggcggcttgaaggatgaagtgtatataaagaatgtcgccagaaataaacgggcatacggcccggggatctctgcgccctgacgttcacaaactgcatatatctgatagacgtgaaacaggagtcataatgaattttcatcatctggcttactggcaggataaagcgttaagtctcgccattgaaaaccgcttatttattaacggtgaatatactgctgcggcggaaaatgaaacctttgaaaccgttgatccggtcacccaggcaccgctggcgaaaattgcccgcggcaagagcgtcgatatcgaccgtgcgatgagcgcagcacgcggcgtatttgaacgcggcgactggagtctctcttctccggctaaacgtaaagcggtactgaataaactcgccgatttaatggaagcccacgccgaagagctggcactgctggaaactctcgacaccggcaaaccgattcgtcacagtctgcgtgatgatattcccggcgcggcgcgcgccattcgctggtacgccgaagcgatcgacaaagtgtatggcgaagtggcgaccaccagtagccatgagctggcgatgatcgtgcgtgaaccggtcggcgtgattgccgccatcgtgccgtggaacttcccgctgttgctgacttgctggaaactcggcccggcgctggcggcgggaaacagcgtgattctaaaaccgtctgaaaaaagtccgctcagtgcgattcgtctcgcggggctggcgaaagaagcaggcttgccggatggtgtgttgaacgtggtgacgggttttggtcatgaagccgggcaggcgctgagccgtcataacgatatcgacgccattgcctttaccggtagtacccgtaccgggaaacagctgctgaaagatgcgggcgacagcaacatgaaacgcgtctggctggaagcgggcggcaaaagcgccaacatcgttttcgctgactgcccggatttgcaacaggcggcaagcgccaccgcagcaggcattttctacaaccagggacaggtgtgcatcgccggaacgcgcctgttgctggaagagagcatcgccgatgaattcttagccctgttaaaacagcaggcgcaaaactggcagccgggccatccacttgatcccgcaaccaccatgggcaccttaatcgactgcgcccacgccgacagcgtccatagctttattcgggaaggcgaaagcaaagggcaactgttgttggatggccgtaacgccgggctggctgccgccatcggcccgaccatctttgtggatgtggacccgaatgcgtccttaagtcgcgaagagattttcggtccggtgctggtggtcacgcgtttcacaagtgaagaacaggcgctacagcttgccaacgacagccagtacggccttggcgcggcggtatggacgcgcgacctctcccgcgcgcaccgcatgagccgacgcctgaaagccggttccgtcttcgtcaataactacaacgacggcgatatgaccgtgccgtttggcggctataagcagagcggcaacggtcgcgacaaatccctgcatgcccttgaaaaattcactgaactgaaaaccatctggataagcctggaggcctgaaatgaccgaacataccagcagttactacgccgccagtgcgaataaatatgcaccattcgacacgctgaatgagagtatcacctgcgacgtttgcgtggttggcggcggctataccgggctctcctccgcgctgcatctggcggaagcgggctttgacgtagtggttctcgaagccagtcgcatcggctttggcgcaagcgggcgcaatggcggacagcttgtgaactcctacagccgcgacatcgacgtgatcgaaaaaagctacggcatggacaccgcccgtatgctcggcagcatgatgttcgaaggtggtgagatcatccgcgaacgtatcaaacgttatcagattgactgcgactaccgccccggcggcctgtttgtggcgatgaatgataaacagctcgccacacttgaagagcagaaagagaactgggaacgctacggcaataaacagctggaattgctggacgccaacgccattcgccgtgaagtagccagcgatcgctataccggtgcgctgctggatcacagcggtgggcatattcatccgctaaaccttgccattggcgaagcggacgccatccgcctcaacggcgggcgcgtgtatgaactttctgccgtgacgcagatccagcacaccacgccagccgttgtgcgaactgccaaaggtcaggtgacggcgaagtatgtgattgtcgccgggaatgcgtatctgggcgataaagtagagccggaactggcgaaacgcagcatgccgtgcggcacgcaggtgatcaccaccgaacggctgagcgaagatttagcccgtagcctgatcccgaaaaactactgtgtggaagactgtaactatctgcttgattactaccgtcttaccgccgacaaccgcctgctgtacggcggcggcgtggtctacggcgcgcgcgacccggatgacgttgagcgccttgtggtgccgaaactgctgaaaaccttcccgcagctgaagggcgtgaaaattgattaccgctggacgggcaacttcctgctgaccctgagccgtatgccgcagtttggtcgcctcgataccaacatctattacatgcagggctacagcggccacggcgtgacctgtactcatctagccggacgtttgattgccgaactgctgcgcggcgacgccgaacgtttcgatgccttcgccaatctgccgcattacccgttccccggcgggcgcacgctgcgtgtgccgtttaccgcgatgggcgcggcgtattacagcctgcgcgatcgtctgggcgtttaattttcgattaaccgtgaagagtcaaaaggtgtgaaacatgagcaacaatgaattccatcagcgtcgtctttctgccactccgcgcggggttggcgtgatgtgtaacttcttcgcccagagcgctgaaaacgccacgctgaaggatgttgagggcaacgagtacatcgatttcgccgcaggcattgcggtgctgaataccggacatcgccaccctgatctggtcgcggcggtggagcagcaactgcaacagtttacccacaccgcgtatcagattgtgccgtatgaaagctacgtcaccctggcggagaaaatcaacgcccttgccccggtgagcgggcaggccaaaaccgcgttcttcaccaccggtgcggaagcggtggaaaacgcggtgaaaattgctcgcgcccataccggacgccctggcgtgattgcgtttagcggcggctttcacggtcgtacgtatatgaccatggcgctgaccggaaaagttgcgccgtacaaaatcggcttcggcccgttccctggtagcgtgtatcacgtaccttatccgagtgatttacacggcattagtacacaggactccctcgacgccatcgaacgcttgtttaaaagtgacatcgaagcgaagcaggtggcggcgattattttcgaaccggtgcagggcgagggcggtttcaacgttgcgccaaaagagctggttgccgctattcgccgcctgtgcgacgagcacggtattgtgatgattgctgatgaagtgcaaagcggctttgcgcgtaccggtaagctgtttgccatggatcattacgccgataagccggatttaatgacgatggcgaaaagcctcgcgggcgggatgccgcttagcggcgtggtcggtaacgcgaatattatggacgcacccgcgccgggcgggcttggcggcacctacgccggtaacccgctggcggtggctgccgcgcacgcggtgctcaacattatcgacaaagaaagtctctgcgaacgcgcgaatcaactgggccagcgtctcaaaaacacgttgattgatgccaaagaaagcgttccggccattgctgcggtacgcggcctggggagcatgattgcggtagagtttaacgatccgcaaacgggcgagccgagtgcggcgattgcacagaaaatccagcaacgcgcgctggcgcaggggctgctcctgctgacctgtggcgcatacggcaacgtgattcgcttcctgtatccgctgaccatcccggatgcgcaattcgatgcggcaatgaaaattttgcaggatgcgctgagcgattaatagcccaacgcaataatgtctgatgcgctgcgcttatcaggcctgcaaacgacgtattgattatgtatgccgaataaagcattcacgccgcatccggcaagttgtattgctcaacttcgttaaatctggtgctttttcaacaacgcgcggaactgatgataagttaaccccagtaattcagccgcgcgcttctggttatatttcccttgttgcaaactgagttgcagcaactctttttcctgctgcatctgaaactcacgtaaatccagcggcagtgttggaaggctggtggtttcactaacggcgatagcgtcttcaggcggacgccgtttaaagggatcaataatgatgtcatcaagcggataatcgctggtgccgtggcgatacacactacgttccaccacgtttttcaattcacgaatatttcccggccaacgataattcagcaatgtttctctggcgcgctccgtaaaccccgggaacagaggcagcttgatttcccgacacatctggatggcaaagtattctgccatcaacattatgtcgctttcgcgctcgcgcagtggtggcagttgtacaacatcaaaagccagtcggtcgagcaggtcagcgcgaaaagtgccttcattgaccatcgccgggagatcggcattcgtcgcgcataccaaccgcacattcacctgcaatggttggctgccgccaacgcgctccagttcaccgtactcaatcacgcgcaataatttctcctgcaccatcatcggtgccgtagcgagttcatcaagaaatagcgtaccgccgtcggcacgttcaaatctccctggatgacgtttttgcgcaccggtaaacgcccccgcttcgtgaccaaacagttcggaatccagcagattttcatttaacgccgcgcagttaagggaaataaacggcccttgccaacgggaggagagataatgcaggcggctggcaatcagctctttaccggtgccgcgttcgccgatgatgagcaccggtttgtccagcggtgcgagatggctaacctgttccagcacttcgagaaagctgttcgcctcaccaagtaaattatctttgtattctgccatgatgaaattcgccacttgttagtgtaattcgctaactcatcctggcatgttgctgttgattcttcaatcagatctttataaatcaaaaagataaaaaattggcacgcaaattgtattaacagttcagcaggacaatcctgaacgcagaaatcaagaggacaacattatgggtattttttctcgctttgccgacatcgtgaatgccaacatcaacgctctgttagagaaagcggaagatccacagaaactggttcgtctgatgatccaggagatggaagatacactggttgaagtacgttctactagcgcgcgcgcgttggcagaaaagaaacagctgactcgccgtattgaacaagcgagcgcgcgtgaggttgaatggcaggaaaaagccgaactggcgctgctgaaagagagagaggatctggcacgtgcagcgttaattgaaaaacagaaactgaccgatctgattaagtccctggaacatgaagtgacgctggtggacgatacgctggcacgcatgaagaaagagattggcgagctggaaaacaaattgagcgaaacacgcgctcgccagcaggcattgatgttacgtcatcaggcggcaaacagcagccgcgatgtgcgtcgtcagctggacagtggcaaactggatgaagcaatggctcgtttcgaatctttcgaacgtcgtattgaccagatggaagcggaagcagaaagccacagcttcggtaaacaaaaaagcctggacgatcagtttgccgaactgaaagccgatgatgcaatcagcgaacaactggcacaattaaaagccaaaatgaagcaagacaatcaataataacatccaggcggcgtccgaacgcgccgccgctcatcgtctaaggagtacttatgagcgcgctatttctggctattccgttaaccatttttgtgctgtttgttttaccgatctggttatggctgcattacagcaatcgttctggtcgcagtgaattgagccaaagtgagcagcagcgattagcgcaactggctgatgaagcaaaacggatgcgcgaacgtattcaggcgctggaatctattcttgatgcagaacatccgaactggagggatcgctaatggcgggcattaatctcaataaaaaattatggcgtattccacagcagggcatggtccgcggcgtctgcgccgggattgccaactattttgatgtaccggtaaaactggtgcgtatcctggtggtgctgagcattttcttcggtctggcgctgtttaccctggttgcttacatcattttgagttttgcgcttgatccaatgccggacaacatggcctttggtgagcagctaccttccagcagcgaattgctggatgaagtcgaccgtgaactggcggcaagtgaaacgcgtttacgcgagatggaacgttatgtcacttccgatactttcacgttacgtagccgtttccgtcaactgtgaggaaagttatgaatactcgctggcaacaggccgggcaaaaggtaaagcctggtttcaaattagcaggcaagctggtacttcttaccgcactgcgctatggcccggcgggtgtggcgggctgggcgataaaaagtgttgctcgccgaccgctgaaaatgttgctggctgtggcgctggaaccgctgttaagtcgggctgctaataaactggcacagcgttataaaaggtgaggggagtttcgcaaaaattgttaaatctcaggcgtataatggatggcaattttcatccatagaaggacgcttacatgtttaaaaaaggcttacttgctctggcactggtgtttagtctgcccgttttcgccgctgaacactggatcgatgttcgtgttccagagcagtatcagcaagagcacgttcagggggccatcaatattcccctgaaggaagtgaaagagcgcattgccaccgccgttccggataaaaacgacaccgtgaaagtgtattgcaatgccggacgccagagtgggcaagcaaaagagatccttagcgagatgggatatacccacgttgagaacgccggtggcctgaaagacatcgcaatgccgaaggtcaaaggttaaaagaattcaccatgagcggcgcttatgcgccgtttttttttctgtcacaccttatttacatccccatagattatttgcgtcagctcacaaatacgctttttccctggtaaaaaatgatttcctgcgtgactaaaacccttgtgctcaattgacagtttattttctgcggagtagtctctcgtttcatgggaccgctaccacggaaaggcaacatgaaacagaaaattacggattacctggacgaaatctacggtggaacatttaccgcaactcatttacagaaacttgtaacgcgtcttgagagtgcgaaacgattaattacacagcgacgtaaaaaacactgggatgaaagtgatgtcgtgttaattacctatgccgatcaatttcacagcaatgatttaaaaccattacccacatttaatcagttttaccatcaatggctgcaaagcatttttagtcatgttcatttgttgccgttttatccatggagttctgatgatggctttagcgtaattgattatcatcaggtcgccagtgaagcgggggagtggcaggatattcagcaactcggtgaatgcagtcatttaatgtttgattttgtctgcaaccatatgagcgcaaaaagtgaatggtttaaaaactatttacaacagcatccaggttttgaagatttttttattgccgttgacccgcaaaccgatctcagcgccgtcactcgcccgcgtgcgttaccgttattaacgccattccagatgcgcgatcatagtacgcgccatttatggaccacctttagtgacgatcaaattgacctgaattaccgtagccctgaagtgttgctggcgatggtggatgttttactctgttaccttgcgaaaggtgctgagtatgtccgcctggatgccgttggctttatgtggaaagagccgggaacaagctgcatccatctggaaaaaacacatctgattatcaaactgttacggagcattattgataacgttgcgccaggtacagtgatcattaccgagaccaatgttccgcataaagacaacattgcttactttggcgcaggcgatgacgaagcacatatggtgtaccagttcagcctgccgccactggtgctgcatgcggtgcaaaaacagaacgttgaggcgctttgtgcgtgggcgcaaaacctgacactaccttccagcaacaccacctggtttaacttcctcgcctctcacgatggcatcgggctaaacccgctacggggcttgttgcctgaaagcgaaatattagagctggtcgaggcgttacagcaggaaggtgcattagtaaactggaaaaataatcccgacggtacacgcagtccgtatgaaataaatgtgacctatatggatgcgttaagccgccgtgagagtagcgatgaagaacgttgcgccaggtttatccttgcccatgcgattttgttaagtttccccggtgtgccagcgatatatattcaaagtattcttggcagccgtaatgattacgcaggtgtcgaaaaactcggatataaccgtgcgattaaccgtaaaaaatatcacagtaaagagataacccgagaactgaacgatgaagctacattaaggcatgcggtatatcatgagttgagccgtttaattacacttcgtcgcagccataacgagtttcatccggataataattttaccattgatacgattaatagttccgtaatgcgtattccaagaagtaacgctgatggtaattgtctgactggattgtttaatgtcagtaaaaatattcagcatgtaaatattactaatctgcatggtcgggatctgattagtgaagttgatatattgggtaatgaaataacgctgcgcccctggcaggttatgtggattaaataaaaaggaacatctcatgattaaaagtaaaatcgtgctgttaagtgcactggttagttgcgccctgattagtggctgtaaagaagaaaataaaacgaatgtatccatcgaatttatgcattctagcgtggagcaggagcgccaggccgttatcagtaaattgattgcccgttttgaaaaagaaaaccctggcatcaccgttaagcaagtgcccgtggaagaagatgcctataacactaaagtcattactcttagtcgtagcggtagcctgccggaagtgatcgaaaccagccatgactacgccaaagtgatggacaaagagcagcttatcgatcgcaaagcggttgccacagtcatcagcaacgttggtgaaggcgcgttttacgatggcgtactgcgtattgtgcgtaccgaagatggtagcgcatggaccggtgttcctgtcagcgcctggattggcggtatctggtatcgcaaagatgtgctggcaaaagcggggcttgaggagccgaaaaactggcaacagctgctggacgttgcacagaaactgaatgacccggcgaataaaaaatacggcattgcgctgcctacagcagaaagcgtgttgacggaacaatccttctcccagtttgcgttatccaaccaggctaacgtctttaacgccgaaggcaaaatcacccttgatacaccagagatgatgcaggcactgacctattaccgcgaccttactgccaacactatgccgggttctaacgacatcatggaagtgaaagacgcctttatgaacggcaccgcgccgatggcgatttactccacctatatccttccggctgtgattaaagaaggcgacccgaaaaacgtcggtttcgtggtgccaaccgagaaaaactctgcggtctacggcatgttgaccagcctgaccattaccgccgggcaaaagaccgaagagacggaagcagcagaaaaatttgtcacctttatggagcaggcagacaacattgccgactgggtgatgatgagcccaggtgctgcgctgccggtgaataaagcggtggtgactaccgccacctggaaagacaacgacgttattaaggcgctgggtgaactaccgaatcagctaatcggtgaactgccaaatattcaggtttttggcgcagtaggggataaaaactttacccgcatgggtgatgtgacgggttctggcgtggtgagtagtatggtgcataacgtcaccgtgggtaaagccgatctctctactacgctgcaagcgagccagaaaaaactggatgaactgatcgaacagcactaaacccaggacaggaatccgcaatgaacaggctttttagtggtcgttccgatatgccctttgcgctgctgcttctcgcgcccagcttattactgctgggcggtctggtggcgtggccgatggtgagcaatatcgaaatcagttttttacgtctgccgctcaatcccaacatcgagagtacgtttgttggggtgagcaactatgtgcgtatcctctccgatcccggcttctggcatagcctgtggatgacggtctggtataccgcgctggtggtggcgggcagcaccgtgctcgggctggcggtggcgatgtttttcaaccgcgagttccgcctgcgcaaaaccgcgcgtagcctggtgatcctctcctacgtaacgccgtccattagcctggtgttcgcctggaaatacatgttcaacaacggctacggcattgttaactacctcggcgtcgatcttctgcatctctatgagcaggcaccgctgtggttcgataatccgggcagtagctttgtgctggtggtgctgttcgccatctggcgctacttcccgtatgcctttatcagctttctggcgattttgcagaccatcgacaaaagcctgtacgaagcggcagagatggatggcgctaatgcctggcaacggtttcgtatcgtcacgctgcccgcaattatgccggtcctggcgacggtggtgacactgcgcaccatctggatgttctacatgttcgcggatgtttatttgctgacgaccaaggtcgatattctcggtgtatatctctacaaaaccgcctttgcctttaatgatttaggaaaagcggcggcgatcagcgtggtgctcttcatcattattttcgctgtcattctgctgaccaggaaacgggtgaacctcaatggcaacaaataaacgcacactcagtcgcatcggtttttactgcgggctggcgctgtttctcatcatcacgctgtttccattttttgtgatgctgatgaccagcttcaagggcgcgaaagaggcgatcagtctgcatcctacgctgctgccgcagcagtggacgctggagcattacgtcgacatttttaacccgatgattttcccgtttgtcgactacttccgtaacagtctggtggtgtctgtggttagttccgtggtggcggtattcctcggcattcttggggcttacgcgctttcccgcctgcgctttaaaggtcggatgaccatcaacgccagcttttacacggtgtatatgttctctggcattttgctggtggtgccgcttttcaaaatcatcaccgcgcttggcatttacgacactgagatggcgctgatcatcaccatggtgacgcaaactctgcccaccgccgtgtttatgctgaaaagctacttcgacaccatccccgatgagatcgaagaagcggcgatgatggatggcctcaaccgtctgcaaattatcttccgcatcaccgtgccgttggcgatgtccgggctgatatccgtgttcgtctactgctttatggtggcgtggaacgactatctgtttgcgagcattttcctctccagcgccagcaatttcaccttaccggtgggcctgaacgcgctgttcagtacgccagattacatctggggacggatgatggcggccagtctggtgaccgcattgccggtggtgattatgtatgcgcttagcgaacgttttattaagagtggtttgaccgccggtggcgtgaagggctaaagcggccagtttctttacaaggagttttaaatgaaaaagttagtagccacagcaccgcgtgttgctgcgctggttgagtatgaagatcgggcgattttagctaatgaagtgaagatccgcgtgcgtttcggcgcaccgaaacacggaacggaagtggtcgacttccgcgccgccagcccgtttattgatgaagactttaacggcgaatggcagatgttcactccgcgtccggcagatgcgccgcgcggcattgagtttggcaaattccagcttggcaacatggtggttggcgacattatcgagtgcggcagcgacgttaccgactacgcggtgggcgacagcgtatgcggctacggcccgctctccgagacggtcatcattaacgcagtgaataactacaagctgcgcaaaatgccgcaaggcagctcctggaaaaacgccgtctgctacgacccggcgcagtttgccatgagcggcgtgcgcgatgccaacgtgcgcgtaggggattttgtggtggtggtagggcttggcgcaatcggtcaaattgccatccaactggctaaacgcgctggcgcttctgtggtgattggcgtcgatcctatcgcccatcgctgtgatattgcccgtcgccacggcgcggatttctgccttaaccccatcggcactgatgtaggtaaagagatcaaaacgctgaccggcaagcagggtgccgatgtgattatcgaaaccagcggctacgccgacgcgctgcaaagcgcgctccgcggtctggcttatggcggcaccatctcctatgtcgcgtttgccaagccgtttgccgaaggttttaacctcggacgcgaagcgcatttcaataacgccaaaattgtcttctctcgcgcgtgcagcgaaccgaacccggattatccgcgctggagccgcaagcgtattgaagaaacctgttgggaactgctgatgaacggttatctcaattgcgaagatttaatcgacccggtggtgacctttgccaatagcccggaaagctatatgcagtatgtcgaccagcatccggaacagagcatcaaaatgggcgttacgttttaattcaaaggaatgaaaaaaatgaaaatcggcacacagaatcaggcgttctttccggaaaacattctggagaaatttcgttatatcaaagagatgggcttcgatggttttgagattgacggcaaactgctggttaacaacatcgaagaagtcaaagcggcgatcaaagaaaccggtttaccggtgaccaccgcctgcggtggctatgacggatggattggcgactttatcgaagagcgtcgtcttaatggcttaaagcagatcgagcgcattctcgaagcgctggcagaagtgggcggtaaaggcatcgtcgttccggctgcgtggggcatgtttaccttccgcttaccgccgatgaccagcccgcgtagcctggacggcgaccgcaaaatggtgagtgattccctgcgcgtactggaacaggtcgccgcgcgtaccggaaccgtggtgtatctcgaaccgttaaaccgctatcaggatcatatgatcaacaccctcgccgatgcccgccgttacatcgtcgaaaacgatcttaaacatgtacagattatcggcgatttctatcacatgaatatcgaagaagataacctggcgcaggcgctgcatgacaaccgcgacctgctcggtcatgtgcatattgcggataaccatcgctaccagccgggcagcggcaccctggatttccacgcgctgtttgaacagctgcgcgcggataactatcagggctatgtagtgtacgaagggcgtatccgggcggaagatcctgcccaggcgtaccgtgatagcttggcctggttgcgtacctgctaagaggtctttgtgaaaagtgcaatgacaagctctccgctgcgggtcgcgataataggcgcaggccaggtggcggataaggttcatgctagctactactgcacccgcaacgatctggaactggtggctgtctgtgacagccgcctttcccaggcgcaggcgctggcagaaaaatacgggaatgcatccgtgtgggacgatccgcaggccatgctgctggcggtgaaacctgatgtggttagcgtctgcagtcctaaccgttttcattacgaacataccctgatggcactggaagcgggctgccatgtgatgtgcgaaaaaccgcccgccatgacgccagaacaggcgcgggaaatgtgcgataccgcgcgcaaactgggcaaggtgctggcctacgactttcaccatcgttttgcgctcgatacgcaacagctgcgtgaacaggtgaccaacggcgttttgggagagatttacgttaccaccgcccgcgccctgcgtcgctgcggcgttcccggctggggtgtctttaccaataaagaactgcagggtggtggcccgctgatcgacatcggcattcatatgctggatgctgcgatgtatgtgctgggctttccggcggtgaaaagcgtgaatgcgcatagctttcaaaagatcggcacgcaaaagagctgtggtcaatttggtgagtgggatccggcaacttacagcgtcgaagatagcctgtttggcaccattgaatttcataacggcggcattctgtggctggaaacgagttttgcactcaacatccgcgaacagagcattatgaacgtcagcttttgtggtgataaagctggtgcgacgctgtttccagcacatatctacaccgataacaacggtgaattaatgacgctgatgcaacgggaaatagcagacgacaaccgccatttgcgcagcatggaagcctttatcaatcacgtacagggcaagcccgtgatgatagccgacgccgagcaggggtacatcatccagcaactggtggcggcgttgtatcaatccgcagaaacagggacgcgtgtggaattatgaccaggccagtaacgttaagtgaaccccatttcagccagcataccctgaacaagtatgcaagcctgatggcgcaggggaacggctatcttgggcttcgcgccagccatgaagaagattacacgcgccagacgcgagggatgtatctggcggggctgtatcatcgggcgggaaaaggtgaaatcaacgaactggtgaacctgcctgatgtcgtggggatggagattgccataaatggtgaggttttcagcttatcccacgaagcctggcagcgtgagcttgactttgccagtggcgaattacgccgcaatgttgtctggcgtaccagcaacggcagtggttacaccatcgccagccgtcgctttgttagcgcagaccaactgccgctcattgcgctggaaatcactattacgccactggacgccgacgcgagtgtgctgattagtacaggcattgacgccacgcaaaccaatcacggtcgccaacatctcgacgaaacccaggtgcgggtgtttggtcagcatctgatgcaggggagctacaccacccaggatggacgcagtgatgtggccatcagctgttgctgtaaggtgagcggtgatgtgcagcaatgctataccgccaaagagcgccgtttactgcaacataccagtgcgcagcttcatgcaggcgagacaatgacgttgcaaaaactggtgtggatcgactggcgggatgacaggcaagctgctttagacgagtggggcagcgcgagccttcgccagcttgaaatgtgcgcgcagcagagttacgaccaacttcttgcagcaagtacagaaaactggcgtcaatggtggcagaaacgtcgtatcacggtaaatggcggcgaagcgcacgatcagcaagcgttagattatgcgctttatcatctgcgcatcatgacgcctgcccacgacgagcgcagcagcattgcggcaaaaggcttaaccggcgaaggctacaaaggccacgttttctgggatacagaagtatttttgttaccgtttcatctgtttagcgatccgacggttgcccgaagtttactgcgttatcgctggcacaacttgccaggcgcgcaggagaaagcgcgacgcaacggctggcagggcgcgctatttccgtgggaaagcgcgcgcagcggcgaagaagagacgccggaatttgccgccattaacattcgcaccgggctgcggcaaaaagtggccagcgcgcaggcggaacatcatctggtggccgatatcgcctgggcggttattcaatactggcagaccacgggggatgaaagtttcattgcgcatgaaggcatggcgctacttctggagacggcaaagttctggattagccgcgcggtgagagttaacgatcgtctggaaattcatgatgttattgggccagacgaatataccgaacatgtcaataataatgcatacaccagctatatggcccgctacaacgttcaacaggcgctgaatattgcccgccagttcggctgtagcgacgatgcgtttatccatcgcgccgaaatgttcctcaaagagctatggatgccagaaattcagcccgacggcgttttgccgcaggatgatagctttatggctaagccggcgattaatctggcgaaatacaaagcggcggcggggaagcaaaccatactgctggattatagtcgcgcagaagtgaacgagatgcagatcctcaaacaagctgatgtggtgatgctcaattacatgctgccggagcagttcagtgcggcaagctgtcttgccaatctgcaattttatgaaccgcgcactattcacgacagcagtttaagtaaagcaatccacggcattgttgccgcacgctgtggcctgctgacccaaagttatcagttctggcgcgaggggactgaaatcgatcttggtgctgatccgcatagttgtgatgatggtatccatgctgccgcaactggcgctatctggctgggggcgattcagggttttgccggggtgagcgtgcgtgacggtgaattgcatctcaatccggcgttacctgagcagtggcaacagttgtctttccctctgttctggcagggctgcgaattacaggtcactcttgacgcgcagcgtattgcgattcgaacttctgcgcccgttagtctgcgtttgaacggtcagcttataaccgtggctgaagaatctgttttctgtttgggtgattttattttgcccttcaatgggaccgctaccaaacatcaggaggatgaatgaaactgcaaggggtaattttcgatctggatggtgtaatcaccgataccgcgcatctgcatttccaggcgtggcagcagattgccgctgaaattggcatcagcattgatgcgcagtttaacgaatccctaaaagggatcagccgcgatgagtctctgcggcgcattctgcaacacggggcaaagagggcgactttaacagccaggagagggcgcaactggcgtatcgcaaaaatctgctctatgtccacagtctacgcgagttgacggtcaacgctgttctacccggcattcgctctttgctggcagatctccgtgcacagcagatcagcgttgggctggcttctgtctccctgaatgcgccgacgattttagcggcgctggagctgcgcgagtttttcaccttctgcgcggatgcttcccaacttaaaaacagcaaaccggacccggaaatctttctcgccgcctgtgcagggctgggcgtgccgccgcaggcatgtatcggcattgaagatgcgcaggcgggcattgacgccattaacgccagcggtatgcgcagcgtggggatcggcgcgggcttaaccggggcgcaattactgttgcctagtacggaaagtctcacctggccgcggttaagcgccttctggcaaaacgtataacaaaggaatcaacatggctcagcttagcttacaacatattcaaaaaatctacgataaccaggtgcatgtggtgaaggacttcaacctggaaattgccgataaagagttcatcgtgtttgtcggcccgagcggctgcggtaagagcaccaccctgcgcatgattgccgggcttgaggagatcagcggcggcgatctgttgatcgacggcaaacgaatgaatgacgttccagccaaagcacgcaatatagcgatggtgttccagaactacgcgttgtatccgcatatgacggtttacgacaacatggcgtttggtctgaagatgcaaaaaatcgccaaagaggtgattgatgagcgggtgaactgggcggcgcaaattctcggcctgcgtgagtacctgaaacgtaagccgggggcgctttccggcgggcaacgtcagcgagtggcgcttgggcgggcgattgtacgcgaagcgggcgtgtttttaatggatgaaccgctctctaaccttgatgccaagctgcgcgtgcaaatgcgcgcagagatcagcaagctgcatcagaaactgaacaccaccatgatctacgtgacccacgatcagaccgaagcgatgaccatggcgacgcggattgtgattatgaaagacgggattgttcagcaagtaggtgcgccgaaaaccgtttataaccaacccgcgaatatgtttgtttccggatttattggaagtccagcgatgaattttattcgcggcacgatcgatggcgataaattcgttacggaaacgcttaaattaaccattcccgaagagaaattagcggttctgaaaacacaggaaagtttgcataagcccatcgtgatgggaatacgaccggaagatattcatccggacgcgcaagaggaaaataacatttccgccaaaattagcgtggcagaattaaccggtgcggaatttatgctctacaccacggttgggggcacgagttaaacggttgggggcacgagttagtggtccgtgctggtgcgttaaatgattatcatgcaggagaaaatatcactattcattttgatatgacgaaatgtcatttctttgatgcagaaacggaaatagcaattcgctaaatacagggggaaggcattcccccaggataatacaaggaacaataatgaaaaagttattaccctgtaccgcactggtgatgtgtgcgggaatggcctgcgcacaggccgaggaaaggaacgactggcactttaatatcggcgcgatgtacgaaatagaaaacgtcgagggttatggcgaagatatggatgggctggcggagcctagtgtctattttaatgccgccaacgggccgtggagaattgctctggcctattatcaggaagggccggtagattatagcgcgggtaaacgtggaacgtggtttgatcgcccggagctggaggtgcattatcagttcctcgaaaacgatgatttcagtttcggcctgaccggcggtttccgtaattatggttatcactacgttgatgaaccgggtaaagacacggcgaatatgcagcgctggaaaatcgcgccagactgggatgtgaaactgactgacgatttacgtttcaacggttggttgagcatgtataaatttgccaacgatctgaacactaccggttacgctgatacccgtgtcgaaacggaaacaggtctgcaatataccttcaacgaaacggttgccttgcgagtgaactattatctcgagcgcggcttcaatatggacgacagtcgcaataacggtgagttttccacgcaagaaattcgcgcctatttgccgctgacgctcggcaaccacagcgtgacgccgtatacgcgcattgggctggatcgctggagtaactgggactggcaggatgatattgaacgtgaaggccatgattttaaccgtgtaggtttattttacggttatgatttccagaacggactttccgttagcctggaatacgcgtttgagtggcaggatcacgacgaaggcgacagtgataaattccattatgcaggtgtcggcgtaaattacagcttctgataatgggctaaattgccggatgcggcgcgagtactttatccgatctataaatgtaggccggataagatgcgctagcatcgcatctggcattcaggcaaggtagctggtatttatttcagcgtcatatgcgtggcaacggtaatattctgtggactcggttttccagaaattaagcggaataataactcgcagctttgttgacctaactcctgcgtcggaacatcgatgccgcccggtgcaggcgttaaaataaaactcagcgtttcattgctataacccaccaccgctaactgctgcggaatagcaatatttttctctgctgccgcacgataaatgctcattaatttcaggctgtcagtggcaaacaccgcctcaggcaacggactctggcttaataattgccgtgctgcttttaatgcagtttcatgggtataaccgccatcaacaatccattcatcacgcactgcaatattatgcgcagccaggctctgcttataaccattaacgcgatcaacgctaacatggacatcaagcggagcatgcaggcaggcaatattttgatgcccactttcaattaatgcatcggtcaacgcaatgctgtcgccaaaattatcggtatcgacagaataaacatgggcatattgaccttcaactttgccaatcaccaccaccggaatatcatatttatcgagttgggcaaaaaaactctcatccgctgggctactgagcataataatgcctttaatcattttctgcttaattttgctttcgcatttttgcagatcttctgccggattgtggctcgtttgtaatatcacgtcgaaaccttcttcttcagctttggcggtgatggcatgcaaaacttcagagaaaaacggattacccgccgtagttttggtgctacgggtagaaatcaccataatggcatcaaaaccgctagaggtcagcgcgcgggccagcttgtttggctgatactgtaattcttcaatggcccgtaacactttttcgcgcgcttccggggagatattagtttgcttattcagcacgcgacttacggtggatttacttacgcctgcaaccctggcaatatcataaatagtaggggacataggtcaggaactccgtccgaacgtgaatgctgcacatcttatggagttcgccggtcgatgacaacacgggcagttgataatcaatggcctggcccccacattcatatccttacgaatgattttttttctggtcttcagagcagcacaggacagcaatgaagcgacttaaaaatgaactcaatgcgctggtgaatcggggtgtcgacagacatctgcgcctcgctgtaaccggacttagccgcagcggcaaaacagcgtttatcaccgcgatggttaatcagttgcttaatattcacgccggagcacgtttgccgctgttaagtgcggtgcgtgaagagcgcctgctgggcgtgaaacgcattccccagcgtgactttggcattccgcgcttcacctatgacgaagggctggcgcagttatatggcgatccacccgcctggccaacgccaacgcgcggcgtcagtgaaatccgcctggcgctacgttttaaaagcaatgatagcctgctacgccactttaaggatacctccacgctgtatctggaaattgtggattatcccggcgaatggttgctcgacctgccgatgctggcgcaggactatttaagctggagccgccagatgacgggcttactcaatggtcagcgcggagaatggagcgcgaaatggcgaatgatgagcgaagggctggacccgctagcgcctgccgacgaaaaccggctggcggacattgccgccgcgtggaccgattatctccaccactgtaaagagcaggggctgcactttattcagcctgggcgctttgtcttgccgggagatatggcaggtgcgcccgcgctgcaattcttcccgtggccggatgtcgatacctggggcgagtccaaactggcgcaggccgataagcataccaatgccggaatgctgcgcgagcgctttaattattactgcgagaaggtggtgaaggggttctataagaatcattttctgcgctttgaccgccagattgtgctggtggattgcctgcaacctctcaacagtgggccacaggcatttaatgatatgcgtctggcactgacgcagctgatgcaaagttttcactacgggcagcgtaccctgttccggcgtttgtttagcccggttatcgataagctattgtttgctgccactaaagcggaccatgtgaccatcgatcagcacgctaatatggttagtttactgcaacaactgattcaggatgcctggcaaaatgcggcgttcgaagggatcagcatggactgcctggggctggcgagtgttcaggcgaccaccagcggcattattgatgttaacggtgagaaaatcccggcgctgcgtggtaatcgacttagcgatggcgcaccgctcactgtttatcctggcgaagttcccgcacgtttgcctggtcaggcgttctgggataagcaaggcttccagtttgaggcatttcgtccgcaggtgatggatgtcgacaaaccactaccgcatattcgtcttgatgctgcgctggaatttttaataggagataaattgcgatgaccgaaccgttaaaaccacgtattgatttcgacggtcctctggaggtcgatcagaatcctaaattcagggcgcagcagacctttgacgaaaatcaggcgcaaaattttgccccggccacgctcgacgaagcgcaggaagaagaggggcaagtcgaagcggtaatggacgcagcgttacgtccgaaacgcagcctgtggcgcaaaatggtgatgggagggctggctctgtttggcgcaagcgttgtcgggcagggtgtacagtggacaatgaatgcctggcaaacccaggactgggtggcgctgggtggatgtgccgctggggcattgattatcggcgctggcgtaggttctgtggtaacagagtggcggcgcttatggcgcttgcgacagcgcgcccatgaacgcgacgaagcgcgtgatttattgcatagccacggcacgggcaaaggccgcgcattttgcgaaaaactggcgcagcaggcgggtattgatcagagccatccggcgctgcaacgctggtatgccagtatccatgaaacgcaaaacgaccgtgaagtggtcagcctgtatgcgcatttggtccagccagttttagatgcccaggcgcggcgcgaaatcagccgtagcgcggcggaaagtacgttgatgattgcggtcagcccgctggcgttggtcgatatggcgtttatcgcctggcgcaatctgcgtttaattaatcgcatcgccacgctgtatggcattgaactggggtattacagccgtttgcgtctgtttaagctggtattgctgaatatcgcttttgccggagccagcgaactggtgcgcgaagtggggatggactggatgagccaagatctcgctgctcgtttgtctacccgcgcagctcaggggattggtgcaggacttctgacggcacgactcgggattaaagctatggagctttgccgcccgctgccgtggattgacgatgacaaacctcgcctcggggatttccgtcgtcagcttatcggtcaggtgaaagaaacgctgcaaaaaggcaaaacgcccagcgaaaaataatgcaatatcgggtgctgaccggatatctttacgccgaagtgcccgtttttccgtctttgtgtcaatgattgttgacagaaaccttcctgctatccaaatagtgtcatatcatcatattaattgttcttttttcaggtgaaggttcccatgcgtctggaagtcttttgtgaagaccgactcggtctgacccgcgaattactcgatctactcgtgctaagaggcattgatttacgcggtattgagattgatcccattgggcgaatctacctcaattttgctgaactggagtttgagagtttcagcagtctgatggccgaaatacgccgtattgcgggtgttaccgatgtgcgtactgtcccgtggatgccttccgaacgtgagcatctggcgttgagcgcgttactggaggcgttgcctgaacctgtgctctctgtcgatatgaaaagcaaagtggatatggcgaacccggcgagctgtcagctttttgggcaaaaattggatcgcctgcgcaaccataccgccgcacaattgattaacggctttaattttttacgttggctggaaagcgaaccgcaagatagccataacgagcatgtcgttattaatgggcagaatttcctgatggagattacgcctgtttatcttcaggatgaaaatgatcaacacgtcctgaccggtgcggtggtgatgttgcgaagtacgattcgtatgggccgccagttgcaaaatgtcgccgcccaggacgtcagcgccttcagtcaaattgtcgccgtcagcccgaaaatgaagcatgttgtcgaacaggcgcagaaactggcgatgctaagcgcgccgctgctgattacgggtgacacaggtacaggtaaagatctctttgcctacgcctgccatcaggcaagccccagagcgggcaaaccttacctggcgctgaactgtgcgtctataccggaagatgcggtcgagagtgaactgtttggtcatgctccggaagggaagaaaggattctttgagcaggcgaacggtggtagcgtgctgttggatgaaataggggaaatgagtccacggatgcaggcgaaattactgcgtttccttaatgatggcactttccgtcgggttggcgaagaccatgaggtgcatgtcgatgtgcgggtgatttgcgctacgcagaagaatctggtcgaactggtgcaaaaaggcatgttccgtgaagatctctattatcgtctgaacgtgttgacgctcaatctgccgccgctacgtgactgtccgcaggacatcatgccgttaactgagctgttcgtcgcccgctttgccgacgagcagggcgtgccgcgtccgaaactggccgctgacctgaatactgtacttacgcgttatgcgtggccgggaaatgtgcggcagttaaagaacgctatctatcgcgcactgacacaactggacggttatgagctgcgtccacaggatattttgttgccggattatgacgccgcaacggtagccgtgggcgaagatgcgatggaaggtagcctggacgaaatcaccagccgttttgaacgcagcgtattaacccagctttatcgcaattatcccagcacgcgcaaactggcaaaacgtctcggcgttagtcataccgcgattgccaataagttgcgggaatatggtctgagtcagaagaagaacgaagagtaagcgcgaatatgcctgatggtgcaacaccatcaggcatattaaattatgctttcagtacagccagagctgcttcgtaatccggctcggtggtgatttcatccaccagctggctgaaaatcacattgtcattttcgtcaataaccacaacggcacgcgctgccagacctttcagtgggccatcagcaattgccacaccgtaagcttgcagaaattcagcgttacggaaagtggagagggtgataacgttgttcagaccttctgcgccgcagaaacgagactgggcgaacggcagatcggcagagatacacagcacaacggtgttgtcgatctcagttgccagttggttaaacttacgtacacttgcggcgcaaacaccggtatcaatactcgggaaaatgttcagcactttgcgtttacccgcaaactgaccgagggtgacgtcagacagatcttttgccacgagagtaaaagtctgcgctttgctacccgcctgcgggatggaattggcgactgtaaccgggttgccctggaaatgaacggtttgactcatgattatctttcctgtttacatatagttaacgtcacacctagtttatgctaactgtcaataacacagcaaacgctattacagggtctccttacaacaactgtcaacgcagtttgtaattaaaagattaacccatatctggtgaatgaaacagtgatgaaccttctgccagatcaataaatcagaaaaatttaatgatatgacagaaggatagtgagttatgcggaaaaatcaggcaacgttacgcgtatgaccggcaagctgggccagcgcatcgttattttcgatggtgatgtatttacctttgactgccagcatgccgcttttctggaagcgacccagcagacggctgatggtttctaccgtcaggcccagatagttaccgatatcgccacgagtcatcgtcaggcggaattcacgaggggagaagccgcgttgggcaaaacgacgggacaggttgtagatgaatgcagccagacgttcctcggcatttttcttgctcaacagcaggatcatgtcctgatcgcctttgatttcaccgctcatcagacgcatcatctgctgacgcagattcggcattttaccggacaaatcgtccagcgtttcgaacgggatttcacataccatgctggtttccagcgcctgcgcgaagctcgggtgatggccgctgccgatggcgtcaaatcccaccaggtcgcctgctaaatggaaaccagtgatttgctcgtcgccttgctcagtgatggtataacttttaatcgtaccggagcggatggcataaaggcttttaagttcatcaccagccttaaacagcgtctggcctttctgaataggcttcttccgctcaatgatattatcaagctgatcaagctcatgttcgttgagtgtgaacgggatgcaaagctggctgatgctgcaatcctggcaatggatagcacaaccgccagactgaatgcgccgtataattcgcttttccgggatcataggtctgctcaagccgtaattgatatttgtcaattttaacatctttttagggagcaagtaagtctaagcaaaccttaacagcagagaattccgatattagatgtaaatatatgtctatctatttgaaaacccttaagttgttaagggtaactttacataaaagtgtgaacaagctggcacaaattgtttaatgtttacagcaaaagataaccttcatggcgcaataaccactcttttcgctgaactccgcctgcatatccggtcatggtgccgtttcggccaataacccgatggcaaggtacgacgatgctgatgggattgcttccgtttgccgcaccaacggcacgcgccgcgccaggacggcccaattgctcagccagttggccgtaatgcattacctgcccgcaggggatagtgcgtagtgttttccagacttcgcgctgaaatggcgtcccccccgtagcagtgggaagcgtatcaataatgctaagattaccggcaaaatattcacgaagcttgtcgcttaaaccgcctggattggtggcagaaatgcgctcatagccttctttgcgataatggatgtccagcagctgcaccatgcgttcgctgtactcttcccattcaaccgcccgcaggcgaaattgctcatcgcaaatcacccacagtggacccagtggcgtggcaattttttcttcaagtaatctcagcatccgttctctcttaagacaaacgtgggtaaatacccggacctatcggcagaccgacaagataccacgccagcacatcgcagccatactatgcagaaacaatgctgtcgatggctgcttttgcgtcagactgtgctttcgctgccatttccggaccgtatgcgatcccttcggcgaagacaaatttcacatcggtaatgccgataaagccgaggaacgtggacagatacggcgtcaccaggtccgttggtccatctttgtggatcccgccgcggctggtaataacgatggcttttttacccgttaccagaccttccggaccgttctcggtatagcggaaagtaacgcctgcgcgggcaaccaggtcaaaatagtttttcaactgagtcgagatgttgaagttatacatcggtgccgcaataacgataacgtcgtgggctttcagctcggcaatcaactcatcggaaagtgccagagcttcctgctgacgcggagtcagcggcgcatcgctcggacgcagagcgccaaccagttcgccatccagtaccggaatcggatttgcagccaggtcgcgaacggtgatttcatcagcggagtgcttttcgcgccattgttcaacaaaataatcggacaactgattagactgagagtaccctgccaggatgctggatttaagaactaataccttgctcatggtgtttccttatagatgtttgaatgggcgatgccccgttgcttgttgacactttattcacaatcctgccacagagatagcgcaataaatcgaagcctatgttcgaatttattgaacaacgcatagaaagccgcgatgtggtactctatatctatcatttaaaagaaaattaatcaggcagactactgcccactaacgttatgacagaacaacaaaaattgacctttacggccttgcagcagcggctggattcgctgatgctgcgtgacagactgcgtttttctcgccgtctgcacggcgtgaagaaggttaaaaatcctgatgcacaacaggccattttccaggagatggcgaaagagattgaccaggcggcagggaaagtcctgctgcgtgaagcggcacgaccggaaattacttatcctgacaatttaccggttagtcagaaaaaacaggacattctcgaagcgattcgtgatcaccaggtggtgatcgtcgccggggaaacgggttctggtaaaacgactcagttaccgaaaatctgtatggagctggggcgcgggattaaaggactgatcggccatacccagccgcgtcgtctggcggcaagaacagtggcgagccgtattgcggaagagctgaaaacggagccgggcggttgcatcggttacaaagtgcgtttcagcgatcacgtaagtgataacacgatggtcaagctgatgaccgacggtatcctgctggcggagatccagcaagaccgcctgctgatgcagtacgacactatcattattgacgaagcgcacgaacgcagcctgaatatcgattttttgctcggctatttgaaagagttgctgccgcggcgtcctgacctaaaaatcattatcacttccgcgactatcgacccggaacgctttagccgccactttaataatgcgccgattattgaagtctccggtcggacctatccggtggaagtgcgctatcgcccgattgttgaagaagccgatgacaccgagcgcgatcagttgcaggcgatttttgacgccgtagacgaactgagtcaggaaagccatggcgacattctgatctttatgagcggcgagcgggaaatccgcgataccgccgatgcgctgaacaagctgaacttacgccataccgaaatcttgccgctttatgcgcggcttagcaacagcgaacaaaatagggtattccagagccacagcggacggcgcattgtgctggcgaccaacgtcgcggaaacgagcctgaccgtaccggggattaaatacgttatcgaccccggtacagcgcgtatcagccgctacagctatcgcaccaaagtgcagcgtttgccgattgagccgatttcccaggcgtctgccaatcagcgtaaaggccgctgtggtcgtgtgtccgaagggatctgtattcgtctctattccgaagacgatttcctcagccgcccggagtttaccgatccggagattctgcgtaccaacctggccagcgttattttgcagatgaccgcgctggggctgggcgatatcgctgcgttcccgtttgtcgaagcaccggataaacgcaatatccaggatggcgtgcgtctgctcgaagagctgggcgcgatcaccactgatgaacaggccagcgcctataaactgacgccgctcggtcgccagctcagccagttgcctgtcgacccacgtctggcgcgtatggtgctggaagcgcaaaaacatggctgcgtgcgtgaggcgatgattatcacgtccgcgctctccattcaggatccgcgcgaacgtccgatggacaaacagcaggcaagcgacgaaaaacatcgtcgcttccacgacaaagagtctgactttctcgcgtttgtgaatctgtggaattatcttggcgagcagcaaaaggcgctttcttccaacgccttccgtcgcctgtgtcgtaccgattatctcaactatctgcgcgtgcgcgaatggcaggatatctacacccagttgcgtcaggtggtgaaagaacttggcattccggttaacagcgaaccggcggagtatcgcgaaattcacattgcgttgctgaccggtttactttcccatatcggcatgaaagatgccgataaacaagaatataccggcgcacgtaacgcgcgtttctccatcttccccggttctggtttattcaaaaaaccgcctaaatgggtaatggtggcggaactggtagaaaccagccgcctgtgggggcgcattgctgcgcgtatcgacccggaatgggtggagccagttgctcagcatttgattaaacgcacctacagcgaaccgcactgggaacgggcgcagggcgcggtgatggcaacggaaaaagtcactgtttatggtttgccgattgttgccgcgcgcaaggtcaactacagccagatcgatccggcgttatgtcgtgaactctttattcgccacgcgctggtggaaggtgactggcagacgcgtcacgcattcttccgtgaaaacctgaaactacgggcggaagtagaagagctggaacacaaaagtcgtcgccgcgatattctggttgatgacgaaacgttgtttgagttctacgaccagcgcatcagccacgatgtaatctccgctcgccacttcgacagctggtggaaaaaagtcagccgcgaaacgcctgatttgctcaactttgaaaaaagcatgttgatcaaagagggcgcagaaaaaatcagcaagctggattacccgaacttctggcatcagggcaatctcaagctgcgtttgagctatcagtttgagcccggcgcggatgctgacggtgtgaccgtacatattccgctgccgttacttaaccaggttgaggaaagcgggtttgaatggcagatccccggtctgcgccgcgaactggtgattgctctgattaaaagcttgccgaaaccggtacgccgtaattttgtacccgcgccaaactatgccgaagcgtttttaggccgcgtcaaaccgctggagttaccgttgctcgacagccttgagcgcgagttacggcggatgaccggcgttaccgttgaccgcgaagactggcactgggatcaggtgcccgatcacctgaaaattaccttccgcgtggtggatgacaaaaacaagaagctaaaagaagggcgcagcctacaagatctgaaagatgcgctgaaaggcaaagtgcaggaaacgctatctgcggtggcggatgacggtatcgagcagagcggcttacatatctggagttttggtcagctgccggaaagctacgaacagaagcgtggcaactacaaagtgaaggcgtggccggcgctggtggatgagcgcgacagtgtggcgatcaaactgtttgataacccgctggagcaaaagcaggcaatgtggaacggtcttcgccgtctactgctgctgaatattccaagcccaatcaaatatttacatgaaaagttaccgaacaaagccaagctgggactgtactttaacccgtatggcaaagtgctggagctgatcgacgactgtatctcctgcggtgtggataaattgatcgacgccaatggtggcccggtctggacggaagaaggctttgctgcgctgcatgaaaaagtgcgtgccgaactgaacgacacggtggtggatattgcgaagcaggtcgagcaaatccttacggcagtgttcaatatcaacaaacgtctgaaagggcgggtggatatgaccatggcgctggggctttctgacattaaagcgcagatgggcgggttggtatatcgcggttttgtcactggtaacggcttcaaacggctgggcgacacgctgcgatatttgcaggcgattgaaaaacggctggaaaaactggcggttgatccacatcgcgaccgtgcgcagatgctgaaagtcgaaaacgtccagcaggcgtggcagcaatggatcaacaaactgccgcccgcacgtcgtgaggatgaagacgtgaaagagatccgttggatgatagaagagttgcgcgttagttacttcgctcaacaacttggtacgccttatccgattagtgataagcgtattttgcaggcgatggagcagattagcggttaaccctgctatttgcctgataaagaaaaaacccggtaagcatttagcgccgggttttttattaattctaaaacggtaagggtaaaaattcaggaattcagaaaaatacaattctctgctgcaagatgaataatgtttatctacagcatttccttaaaagatatgtcaggcttgcggagtggcggttaaggacatacgatttcctcctttcagagtgctccgcttctcactattatctcacgcagtattcttaagggaacgataaggaggaaccatgaacattaccccgtttccgacgcttagcccggcaactatagatgccataaatgttatcggacagtggctggcgcaggatgatttctccggtgaggtgccgtatcaggccgattgcgtgatccttgcaggcaatgcggttatgccgactatcgatgcggcatgtaagattgcccgcgatcagcaaattcctttactgattagtggtggtatcggtcacagcacaacttttttgtatagcgccatcgcacagcatccgcactacaacactatccgcaccactggcagagcagaagcgaccatcctggcggatatcgctcatcagttctggcacattccgcatgaaaaaatctggattgaagaccagagtacaaactgcggtgaaaacgcacgctttagcatcgcgctattgaatcaggccgtagaacgagttcatacggctatcgttgttcaggaccccaccatgcagcggcgcacgatggcgacgttccgccgtatgactggggacaatcccgatgcaccacgctggttaagttatcccggattcgttcctcagttaggaaataacgcagacagtgtaatctttattaatcagttacaaggattatggccagttgagcgttatctcagtctactcactggcgagctgccgcgtttacgcgatgatagcgatggctacggtccccgcgggcgagattttatcgttcacgttgattttccggcagaagtcatccatgcatggcaaacgctgaaacatgatgcggtgctcatcgaggcgatggaaagtcgcagcttacgttaaaaattgcccgtttgtgaaccacttgtttgcaaacgggcatgactcctgacttttatttctgccttttattccttttacacttgtttttatgaagcccttcacagaattgtcctttcacgattccgtctctctgatgattgatgttaattaacaatgtattcaccgaaaacaaacatataaatcacaggagtcgcccatgagtgtacccgttcaacatcctatgtatatcgatggacagtttgttacctggcgtggagacgcatggattgatgtggtaaaccctgctacagaggctgtcatttcccgcatacccgatggtcaggccgaggatgcccgtaaggcaatcgatgcagcagaacgtgcacaaccagaatgggaagcgttgcctgctattgaacgcgccagttggttgcgcaaaatctccgccgggatccgcgaacgcgccagtgaaatcagtgcgctgattgttgaagaagggggcaagatccagcagctggctgaagtcgaagtggcttttactgccgactatatcgattacatggcggagtgggcacggcgttacgagggcgagattattcaaagcgatcgtccaggagaaaatattcttttgtttaaacgtgcgcttggtgtgactaccggcattctgccgtggaacttcccgttcttcctcattgcccgcaaaatggctcccgctcttttgaccggtaataccatcgtcattaaacctagtgaatttacgccaaacaatgcgattgcattcgccaaaatcgtcgatgaaataggccttccgcgcggcgtgtttaaccttgtactggggcgtggtgaaaccgttgggcaagaactggcgggtaacccaaaggtcgcaatggtcagtatgacaggcagcgtctctgcaggtgagaagatcatggcgactgcggcgaaaaacatcaccaaagtgtgtctggaattggggggtaaagcaccagctatcgtaatggacgatgccgatcttgaactggcagtcaaagccatcgttgatagtcgcgtcattaatagtgggcaagtgtgtaactgtgcagaacgtgtttatgtacagaaaggcatttatgatcagttcgtcaatcggctgggtgaagcgatgcaggcggttcaatttggtaaccccgctgaacgcaacgacattgcgatggggccgttgattaacgccgcggcgctggaaagggtcgagcaaaaagtggcgcgcgcagtagaagaaggggcgagagtggcgttcggtggcaaagcggtagaggggaaaggatattattatccgccgacattgctgctggatgttcgccaggaaatgagcattatgcatgaggaaacctttggcccggtgctgccagttgtcgcatttgacacgctggaagatgctatcagtatggctaatgacagtgattacggcctgaccagtagtatctatacccaaaatctgaacgtcgcgatgaaagccattaaagggctgaagtttggtgaaacttacatcaaccgtgaaaacttcgaagctatgcaaggcttccacgccggatggcgtaaatccggtattggcggcgcagatggtaaacatggcttgcatgaatatctgcagacccaggtggtttatttacagtcttaatgagtgaaagaggcggaggttttttcctccgcctgtgcgcgtcagagtttagcgaatttttcgagggtgcgaataagctgtgtgacgaagccatattcgttatcgtaccaggcgaccgttttcaccagttgtaaatcgcccacggcggtaatttccgtttgcgtggcatcaaacaccgaaccgaaatggctgccaatgatatcggaagagactatttcttcatcggtataaccaaatgactcgttattggtggttgcttgtttaagtgcgttattcacctcttcggcagtcacttttttccgagaatcgataccagttcagtgaccgaacctgttttcaccggcacgcgttgcgcatgacctttcagtttgccgctcagttccgggatcaccagaccaatggcttttgccgcccccgtagtgtggggaatgatattttctgccgctgcgcgtgaagcacgtaaatctttaccacgcgggccatccaccagtgactgggtgccagtataggcatgaatggtcgtcatcgtgccgacttctatcccgaaactgtcatgcaaggctttggccatcggcgcaagacagttagtggtgcatgacgccacggaaacaatggtgtcgttgccatccagagtgtcgtcattgacgttataaacgatagttttcatttcaccggcaggggcggaaatcaacaccttcttcgcaccagcatcaagatgcgcctgcgatttctcggcggaggtataaaagccagtacattcgacaatgatttctgcacctttcgctttccacggaatatttttagcctctttttcggcgtaaaccgcgatacttttcccatcaacgataagtgaatcttccgtaaaatcaacgctccaggggaatggtccgtagtttgaatcatgtttcagcaggtaggcgagaatttatggggaagtgagatcattaatagcgacaacgtctatgttgcttttgacttcaagtaatcgacccaacaccagtcgaccgatacgaccaaaaccgttaataccaactttactcatggttttctcctgtcaggaacgttcggatgaaaattgatcctttccaagcttagaccaggatggcgggatgggcaatctccattctcacagtgaaacgtaacgtactgaaaacgggtgaacaatatttaatgaaattttgagaaaagcccgttatgttaacggaaaattatgttaaagcaggaaatgttatggaaaataaatatagtaggttacaaatcagcattcactggctggtctttttactggttatcgcagcgtattgcgcaatggagtttcgtggtttcttcccacgtagcgatcggccactcatcaacatgattcatgtttcctgtggcatcagtattctcgtgctgatggtcgttcgtcttttgttaaggctgaaatacccaaccccgccgattatacctaagccaaaaccgatgatgacgggactggcgcatttgggacatttggtgatttatctcctgtttattgcgctgccagtgattggtttggtgatgatgtataaccggggcaacccgtggtttgcgtttggtttgacgatgccttacgctagtgaggccaatttcgaacgggtagatagcttaaagagctggcatgaaacgctggcgaatctgggatattttgttatcgggttgcacgctgcggctgcactggcacaccactatttctggaaggacaacacacttctacgcatgatgccgcgtaaacgttcctgaaggatatttaaagaaaacgcctgtactaaaaccgacccgtggtacaggcgaagaatacgggtctacatcggaagcgcctattatatttatttgtatgataaataaaaccataatccttgcccatacgtccatctggcttatttttaatcaattcacccgatctttgatctcatcaacggtatcaaaataaaccagcgtataacgttcaaatcgaacataagattcgataaaccatggaggttatatgaaaaaactggcacttattttgtttatgggaacgcttgtttccttttatgccgatgccgggcgcaaaccctgttctggtagcaaaggggggatcagtcactgtacggcaggcggcaaatttgtctgtaatgatggttctattagtgcaagcaaaaaaacatgcactaactgaagtgtaaaaggggtgccatgagaaaatgaatctgctagtcaaatgcgcggggaaaatccccgcgcttgcccttacctggacgtgcaggccatgagcgcagcaacctccttatcaccgtcccggaaccgcagttcgtagagcgtttgtcgggtcaggagtgtgaatgtcagaatcgtaatgcagataatgagcagacacaccaccagagggttgtgcttcatagcctttctccttgccggatggcgggtaagaggctaagatctgaattgctaggttcattcgttggcctcggttgatagaaatatcggtcggggccttcgtctttctgattcccggttagcctgaaaacagaaagtctcaggcacccgcaggcatcctatgaggtttccttagggacgaaaataatcacttcacgaaattgcgtgctgttttccagaatttttcgtcattcgggttagccagtttagccattcgttactctcttcattccaatagcattaattttctatgcaataattgttgtaaaaatgtgacgcaaagaggtttttggtcataagtaattaccgtcaagtgccgatgactttctatcaggagtaaacctggacgagagacaacggtaatgaatacaactcccagtcagcgattaggttttttgcatcacatcaggttggttccgttatttgcctgcattctaggcggtatcttagttctattcgcattaagtagtgccctggctggctatttcctctggcaggccgatcgcgatcagcgtgatgttactgcggagattgagattcggaccgggttagcgaacagtagtgattttttgcgtagtgcccggatcaatatgattcaggccggggctgcgagtcgtattgcggaaatggaagcaatgaagcgaaatattgcgcaagccgaaagcgagattaaacagagccagcaaggttatcgtgcttatcagaatcgaccggtgaaaacacctgctgatgaagccctcgacactgaattaaatcaacgctttcaggcttatatcacgggtatgcaacctatgttgaaatatgccaaaaatggcatgtttgaagcgattatcaatcatgaaagtgagcagatccgaccgctggataatgcttataccgatattttgaacaaagccgttaagatacgtagcaccagagccaaccaactggcggaactggcccatcagcgcacccgcctgggtgggatgttcatgattggcgcgtttgtgcttgccctggtcatgacgctgataacatttatggtgctacgtcggatcgtcattcgtccactgcaacatgccgcacaacggattgaaaaaatcgccagtggcgatctgacgatgaatgatgaaccggcgggtcgtaatgaaatcggtcgcttaagtcgtcatttacagcaaatgcagcatagtctggggatgacagtagggactgttcgacagggcgcggaagagatttatcgtggcaccagcgaaattagtgctggcaatgcggacctgagttctcgcaccgaagaacaagcggcggctatcgaacaaactgccgccagcatggagcaactcactgcgacggtgaaacagaatgcggataacgcgcatcatgccagcaaactggcgcaagaggcttctattaaagccagcgatggcgggcagacggtttccggtgtagtaaaaacgatgggcgctatctccacgagtagcaagaaaatttctgagatcaccgccgtcatcaacagtattgctttccagacgaatattctggcactgaatgctgccgttgaagccgcgcgagcgggtgagcaagggcgtggatttgccgttgtcgccagcgaagtacggacactcgcaagtcgcagcgctcaggcggcgaaagagattgaaggcttgatcagtgaaagtgtcaggttaattgacctggggagcgatgaggtggcaacggccgggaaaaccatgagcactattgttgatgccgtcgcgagtgtcacacatatcatgcaggaaatcgccgccgccagcgatgaacaaagtagaggcataacgcaggttagccaggcgatttctgaaatggataaggtgacgcaacagaatgcttctctggtagaagaggccagtgcggcggcggtgtcccttgaagaacaggcggcacgattaactgaggcggtggatgtattccgtctgcacaaacattctgtgagcgcagaacctcgcggagcgggtgaaccagttagtttcgctacggtgtgaaaatgttcaaggagggatcgacagatcccttcacctttcagaacggcatactttttcgaatagcgttaatcatcaactggcaaccagaagagaacgtcgcatctacgcgggtcagtattccaatcggttcgcctgcaccatgtcccggaacaggcagggccaccagcgtggcatgacgcaggtcgtcttttacagcgccagaagggacaaaccacacgtaatcgtattcaaccgtaagttgacgagataggctagcagacagcgtttcgatacaaccgctaggaattttacagccctggctctgcactaatgcatcactatgctggcgtggcgcagtgccttctggacttacaacgaccggccattccagcacccggcttagcgttacgttctcctgaagtagcgggtgattagggcggacaaccagcttcaagctttcaagaaacagcagttcgtaattaagcccggtcatcagttcaggatcactcatccgaccaatgccgatatcgatttccccggtttttaaacccgccagaatcatagggttactcattgtcgcaacttgcaaggtcgtctctttttgttgctgatgaaactgacctataacgctaggtaatatccccagtgccgcagtaggtagtgcaccaaccctgacgacatcattattaagaccttctttacgatgaaggctccgtccggcagtgttgatggcgtcaagaactctgactgcatgcgttaaaaattgttcgccgggtaaggtaagttgcgccccctgacgaccacgctcaaacaagcgagcgccagtcagctgctccagttcattcaatgtcttagagagcgcaggttgactcaaattaagggtttcagccgcgcgccccaaagttccttgttgtgcgacagctacgaatgtatgaaggtggcgcaaacggatgcgctgactaaacagactatttttttccataagcgatgttaaaaacgaagcggtgtcgctgacaagtgaagttgtttgattatgataacttgattgcaaaatattattaacaattaaagcaattatgttacagcaaaatggataatattgatgttttcgcggcgagatcacagtttgtaaattcttcccgcaagagtgaatgcggttacctacactccagattactgaccactggaggcagacactatggcgaacagcatcacggcggatgagattcgggaacagtttagccaggcaatgagtgccatgtaccagcaagaagttccgcaatatggcacgctgctggaactggtagctgatgtgaatctggctgtgctggaaaacaatcctcaactgcacgaaaaaatggtaaatgcagacgagctggcgcgactgaatgttgaacgtcatggggcgattcgcgttgggactgcacaagagcttgctactcttcggcggatgtttgccattatggggatgtacccggtgagctattacgatctcagccaggcaggggtgccggtacatagcacagcatttcggcccattgatgatgcttctctggcgcgtaatcccttccgcgtttttacctccttactccgccttgagcttatcgagaacgaaattttgcgccagaaagcggcggagattctgcgtcagcgcgatatcttcaccccacgttgtcgacaactgttagaggaatatgagcagcagggcggctttaacgaaacacaggcacaggagtttgtgcaggaagccctggaaacgtttcgctggcaccagagtgcaacggtagatgaagaaacctatcgcgcattgcacaacgaacatcggttgattgctgatgtggtctgttttcctggatgccatatcaaccacctgacgccacgtacgctggatattgaccgggtgcagagcatgatgcctgaatgcggaattgaacccaaaattctcatcgaggggccgccgcgccgcgaggtaccgattttactacgccagaccagctttaaagcactggaagagacggtgttgtttgcggggcagaaacagggcacgcataccgcgcgctttggtgaaattgagcagcgtggcgtggcattaacgccgaaagggcgacaactgtatgatgatcttctgcgtaacgctggaaccgggcaggataatctcactcaccaaatgcatttacaggaaaccttccgcacttttcctgacagtgagtttttaatgcgtcagcaagggttggcatggttccggtaccgtctgacgcctagcggtgaggcgcatcgtcaggcgattcatcctggagacgatccacagcccttaattgaacgtggttgggtagtggcgcaacccatcacctatgaagatttcttgcccgttagcgcggcggggatcttccagagtaatctgggtaatgaaacgcagacacgcagtcacggtaatgccagtcgcgaagcatttgagcaggcgttgggttgtccggttttggatgagttccagctttaccaggaagcggaagaacgcagtaaacgtcgctgtggtttgctttaaaatctgaccatccgcctttgcaaaaatttgcctgattttacaaacgaatcaggctcatcccatcgacataaaaaaaatgccgatttatgcatattctctcagttcaacaattggattattaataaatattgtctagagtgagcggtcataaataagcactttcttgccgctgaaaacgaccagcgcgggaccattcacaacaccagaaggactcactttcaggtatggatcgtagacgatttattaaaggttcaatggctatggccgccgtgtgcggtaccagcggcattgcttctcttttttctcaggcggcattcgcggcagattctgatattgccgacgggcaaacccagcgttttgacttctccattctacagagtatggcgcacgacttagcgcaaacagcgtggcgtggtgcgcctcgtccgttacctgacacgctggcgacaatgacgccgcaggcttataacagtattcaatacgacgccgaaaaaagcctctggcataacgttgagaaccgtcaactggacgctcagttcttccatatgggaatgggattccgtcgccgcgttcgtatgttttctgtagatccagcaacacatctggcgcgtgaaattcactttcgcccggagttgttcaaatacaacgatgcaggtgttgatacaaaacaattagaagggcaaagcgatctcggctttgccggttttcgcgtgtttaaagcccccgaactggcgcgccgtgatgtagtaagttttctcggcgcgagttatttccgcgccgttgatgatacatatcaatacggtttgagcgcccgcggcctggcgatcgacacttacaccgacagtaaagaagagttccccgactttaccgccttctggtttgatacggtaaaaccgggggcaactacctttaccgtttatgcgttgctcgatagcgccagcattactggtgcctataagttcactatccattgtgagaaaagtcaggtgattatggatgtggaaaatcacctgtatgcgcgcaaagacattaaacagctgggcattgcgccgatgaccagtatgttcagctgcggtactaatgaacgtcggatgtgcgatacaattcatccgcaaattcatgactctgatcgtctgtccatgtggcggggcaacggcgagtggatttgccgtccgctgaataatccgcaaaaattgcagttcaatgcttacaccgacaacaacccgaaagggtttggtttattgcaactggatcgtgacttctcccattatcaggacattatgggctggtataacaaacgcccaagtctgtgggtggaaccgcgtaacaagtggggtaagggcaccatcggcctgatggaaatcccaacaacgggcgaaacgctggataacattgtctgcttctggcagccagaaaaagctgtaaaagcaggtgatgagtttgcattccagtatcgtctgtactggagtgcgcaaccgcctgttcattgcccattagcgcgcgttatggcgacgcgtaccggcatgggcggtttcagcgaaggttgggcgccaggtgaacactatcccgaaaaatgggcgcgtcgttttgccgtcgatttcgttggtggtgatctgaaagctgccgcgccaaaaggcattgagccggtgattacgctttccagtggggaagcgaagcaaatcgaaattctctatattgaacccatcgatggttatcgtattcagtttgactggtatccgactagcgactccactgatccggtcgatatgcggatgtatctacgttgtcagggggacgctatcagtgaaacatggctgtatcagtatttcccgccagcgccggataaacgtcagtatgttgacgaccgcgtgatgagttaatcgttttttcttcggcaccttcttcgggaggtgccgtctggttaaacacgatcccgctcgcatttttccctaagttaaatgagtaatctgatggtgtgtatttcagatacaccttgtcagccactaacagggagtgcgtatgtttccagaataccgagatttaatatcccgtctgaaaaacgaaaatcctcgctttatgtccttgttcgataaacacaataaacttgatcatgaaattgccagaaaggaaggttccgacggtcgagggtacaatgcggaagtggtccgcatgaaaaaacaaaagctacagttaaaagatgagatgctcaaaatcctgcagcaggagagcgtcaaagaggtgtaaactttcctaagccgccagccaggcggcttttttaacaactgcatggattgactggagataagatgactgaaacgataaaagtaagcgaaagtcttgaattacatgctgttgcagaaaatcacgtcaaacctctttatcagttaatctgtaaaaataaaacctggttacagcagagcctaaactggccgcagtttgttcaaagtgaagaggacacgcgaaaaacggtgcagggtaatgtgatgttgcatcaacgcggctatgccaaaatgttcatgattttcaaagaagatgaacttatcggcgttatcagctttaatcgtattgaaccactgaataaaaccgctgaaatgggctactggctggacgaatctcatcaggggcaggggatcatttctcaggcgctgcaggcattgattcatcattacgcccagtctggtgaacttagacgcttcgtgatcaaatgtcgggtggacaatccgcaaagcaaccaggtcgctttgcgcaatggttttatccttgaaggttgcctgaaacaggctgagttcctgaatgatgcctatgatgatgtgaacttatacgcgcgtattatcgatagtcaataatcacaataaccctgccagcggcgttcgcgtaatgcgctcctcgccgttaatgacttttggaccacggacatgaaccgtgtcgccatcaaaggcttcaacgacggcgtggtcggttaactccacatggttttcaattatcaccgcacctgtaatacggctctcaccttgtatgacaacgtgctcgtcgagcagaatcggtccgccacgtaccacggcatttccgccaaccaagacatgatgttttaacacacaattaccttccacaatggcatattccgccacctggctactgtaatgaatcgtcggaatggcatcttcttctatgccagctttcacctgcgcgtgaccgtagactttagcgcaatcgcatagccagacattgttctcttcattaccttcaatactggcaaaatcaaaaacttcggcgcgatgttcaataaaagcataccggacgacggcatcgccataaatttgtgcctggtggacaatacggctggcgctaacccttgcgcgatcataaatttggagcaggagttgatggtcgggcgttaagccttgtgcggcgacgatcatagaatgttgatcaattaaggcgtgaccaaatattctacattgcccgtaaactaaactgtcatgaatggtgacgctgtcacttatatatgcaccctggctgatttcactattatcgatccagacgttatccgttgcgtaaacctctccccacagcacgctggtgccggtgatacgcgtattaccggaaatcaccgctccgccgaacgcaatagcattctggtcgtaaatccagcaatttccttcttgtgctaacaccgtttcgcgatcgatccagccgccagcggttcctgctatcacatcgttaaaatcgctaatggcgataatctgccgtaataacacattttttttagtgccatcttcctgataactaaaggctcgctgttcttcacttagacgatatttgcgcatagcgttttcccacaggtgacttactataaccgtagcaaattctgcggctctggctatgctcgagaaaattccataaaatgcatttcaaatatactttataaattaaacaaaatgagtaagaagatgcagagcgataaagtgctcaatttgccggcaggctactttggtattgtgttggggacgatagggatgggatttgcctggcgctatgccagccaggtttggcaggtcagtcactggttaggggatgggctggtgattctggcgatgatcatctggggattattgactagcgcatttattgcccgactcatacgctttccgcatagcgtgctggcggaagttcgccatccagtgctgagcagttttgtgagtttgtttccggcaacgacgatgctggtggcgattggttttgttccgtggtttcgcccactggcggtgtgcctgttcagttttggtgtcgtggttcagttggcttatgccgcctggcaaactgcgggattatggcgcggatctcaccctgaagaagctaccacgcctggactgtatctgccgacagttgccaacaactttatcagcgcaatggcctgtggtgcgttgggctacaccgacgccggtctggtgtttttaggcgcaggcgttttcagttggctaagccttgaaccggtgatcttgcagcgtctgcgcagtagcggagaattacccacggcactgcggacaagtctcggcattcagctcgctcctgcgctggtggcttgtagtgcctggctgagcgtcaacggcggcgagggtgacacgctggcgaaaatgcttttcggttatggactgctgcaactgctgtttatgctacgtctgatgccatggtatctctcccagccatttaatgctagtttctggagtttcagcttcggcgtatctgcactggcaaccaccggtttgcatctggggagtggcagcgataatggatttttccatacgctggcggtgccgctgtttatctttaccaattttattattgcaatactgctcatccgtacttttgcgcttctgatgcagggaaaattgttagtcagaaccgagcgcgccgttttaatgaaagcagaggacaaagaatgatcattcgtgacgaaaactattttactgataaatatgaattaacccgcacacactctgaagtactggaagcggtgaaagtggttaaaccgggtaaaacgctggatctgggctgtggcaatggtcgtaacagtctttacctggcagccaatggttatgatgttgacgcatgggataaaaatgccatgagtatcgccaacgtcgagcgcattaaatccattgaaaatctggataatttacacacccgagtcgttgatctgaataacctcacatttgatagacagtacgattttattcttagcactgtggtgctgatgttccttgaggctaaaaccatccccgggttgattgccaatatgcaacgttgcactaaacctggtggttacaacctgattgtggcggcgatggataccgctgattatccatgtaccgtcggcttcccgtttgccttcaaagagggagaattacgtcgatattacgaaggctgggagagggtgaaatacaatgaagacgtcggcgagctgcaccgcaccgacgccaacggtaatcgtattaaactgcgtttcgccacgatgctggcacgtaaaaaatgacccggtaagcacaaaacgcgtgaaaattccccacgctgagatgatttactgttcttcttttcggtaagcatattttttatcgaagggatgtgaaattaatcacagtagtcgaagtttttagcagcttaacttactgaaatttaagtactgatgattgacttagcccctttttcggcattgactatgtcgtctgaaaaggggctgaaaaatttattttcaccaacactttttttgccacaacacgaagcggcgctttttgctataacttagaaagtaatataatcatctcaggaaactattcatgcgtaccacaagttttgcgaaagttgcagctttatgcggcttattggctctgtctggttgtgcatctaaaatcacccagccagataaatattctggttttttaaacaattactctgatttaaaagaaacaaccagcgctacaggtaaacctgttttacgttgggtagacccgagttttgatcaaagcaaatatgacagcatcgtctggaacccaatcacttattatccggtaccgaaaccgagcacccaggtagggcagaaagttctggataaaattttgaactataccaacaccgaaatgaaagaagcgatagcgcagcgtaaaccactggttaccaccgctgggccgcgtagtctgattttccgtggggccattaccggtgtagataccagcaaagaagggctgcaattctatgaagtggttcctgttgcattagtggttgcggggacgcaaatggctacaggccaccgtaccatggatactcgcctctattttgaaggtgagctgattgatgcagcgactaataaaccggttatcaaagtcgttcgtcagggcgaaggtaaagacctgaataacgaaagtacgccaatggctttcgaaaatattaaacaagttattgatgacatggcgaccgatgccaccatgtttgacgttaacaaaaagtaattccagacgcgccatcgttagatggcgctttttatccggtgcgccgtaaaaccccatccttcagggcggggatataaggcgcggttttccacctgaccaggtgtttgctgttgttcaatgtattggcggatgacggatattggcgcacctccgcagctactggcaaaatagccaggactccacaaaacgcctttgtagtaatacctgaatgcaatatctggtcgatctcgtcgcagtcacctacccgatacgcctttgaggctgtttaccagactggatatcgccagtttgggaggatagttaattaacaaatggacgtgatctggttcgccatccatttcaaccagttcagcttcaaaatcagcacatacatttgaaaagtaagtgcgtagtttttctgtcgcgtcatggtcaaaaatctggcgtcggtatctggtgacaaagagcaggtgaacatgcatcaggaaaacacaatgccttccacgccggatatcggtttcttttttcacagaccaaagtatcatttgacctgtgaaacgattacaggcatttaaattccagttaagacccggtggtcaacaggagtgtgaaatgaggcgcttcgcaggcgcatgtcgtttcgttttcaatcgtgctctggcacgtcagaatgagaatcatgaggccggtaataaatacatcccttacgggaaaatggcttcctggctggttgagtggaaaaatgccactgaaacgcaatggcttaaagattctcccagtcagccattgcaacagagtctgaaagaccttgagcgggcttacaaaaacttcttccggaagcgggctgcttttccccgattcaaaaagcggggacagaatgatgcattccgctacccgcagggcgttaagctcgatcaggaaaacagccgtatttttctgccgaaactgggctggatgcgctaccggaacagccgtcaggtcacgggtgttgtgaaaaatgtcactgtcagccagtcctgcggtaagtggtacatcagtattcagacagaaagtgaagtaagtactccggttcaccctagtgcaagtatggtcgggctggatgctggcgtggctaaactcgccacgctgagtgatggcacagtctttgagcctgtaaacagttttcagaaaaaccagaagaagctggcgagacttcagcgacagttaagccgcaaggtcaaattcagcaacaactggcaaaagcagaaacgcaaaatacagcgactgcattcctgtatcgcaaatatccgcagggactaccttcacaaagtcacaacggccgtcagcaaaaaccacgcaatgatagtcattgaggatttgaaggtcagcaacatgagtaagagtgcagcgggtacggtcagccagccggggcgcaatgtccgggcaaaaagtggtttaaaccgtagcatactggatcagggctggtatgaaatgcgccgccagcttgcgtataagcagctctggcgtggcggtcaggtgcttgctgttccgccagcgtatacaagccagcgttgcgcgtactgtggtcatacagcgaaagagaaccgcctgagtcaaagtaaattcagatgccaggtatgtggatatacagcgaacgccgatgtaaatggcgctcgcaacattttagcggcggggcacgccgttcttgcctgtggagagatggtgcagagtggccgcccgttgaagcaggaacccaccgaaatgattcaggcgacagcctgaacgtagcagggatccacgtccttcagggcgtggaggatgtcaatatcggtttctgtcagcgattaaattcaacaccacgtaacaaacgcctccggcaattaatccccaaaacgcagaaccaatcccgaccagcgtcaatccacttgccgttaccagaaatgccaccaccgccgcgtctcgctcacgctcattatgcagcgcctgatacaaactgccgccgatggtacttaacagcgccagacctgccagcatctggatccaacttacgggcagggcagccatcatcccggtaatggcactaccaaacagacctgcgagcaaatagaaaatgcctgcaacggcagcggccagccaacgttgatctttatccggatgcgcttccgggctttggcaaatagccgcggtgattgccgcaataccgacggaataaacgccgaaaggggaaaaaaccagtgccagcaatccagtaaatacaattaatgggctaacaggagcgctatatccagctgctttcattgctgcgatacccggtgcgttttggcttgccatcgtcaccagaaaaagggggagtgcaacgctcaggctgtgagcaaagctaaaatcaggggtaatataagtggggagaacgggtttaaagacaacatcagttgtgacaacgtcaccttgcgcgatgacgatcacgatcccaataatcatcgcggcaattaccgcatagcgcggcgcaacggccttggttgccagccataccagcaacatacttccacacaacgtaaattgaccgtccagactggcaaacgcctgtaaaccaaagcgtaataaaatcccggcaagcattgccgccgcaaggctgtgcggaataatgcgcatcagacgagcaaagagtcccgttatgccgcagaggactattagcgcgttggtgacaataaaaacgccgatggcttcgttaagtgttagtccctgcaatccggtgaccaacaaagccgcgccaggcgtactccatgcggtgagaacaggtacgcgataccataatgtcagagtcagcgtactgacgcccattgccagccccagcgccgtcatccagccagagatttgtgcagtggtggctccggcgacaatcgctgcttgccagattattgccgcactactggcgtagccaattaataccgccagaaaccccgccagtagcgtgggtggaggaatagaaaacagacgcatagtcacctcgtgcgttatagcgtacaggcaccgtagcatttgtccgttataacgcacaagtgataaacttccgttttgccggaggagtcgcatggaaaatctcgctcgctttttatccaccacacttaaacaactacgccagcagcgcggctggagtcttagccgactggcagaagcgacgggcgtttctaaagcaatgttagggcagattgagcgtaatgagtccagtccgacggtcgcgacattatggaaaattgccaccgggttgaacgtaccatttagtacatttatttctccgccgcagtccgctacgcctagtgtttatgatccacaacagtaggcgatggtgatcactagcctgtttccttatgatccacaactctgctttgaacacttcagcattcagatggcatctggtgcaataagcgaaagcacgccccatgagaagggggtaatcgaacatgtcgtcgtcattgatggacaacttgatctgtgcgttgatggggaatggcagacccttaattgtggggaaggcgttcgatttgctgcagacgtcacgcatatctatcgtaatggtggggagcaaaccgtacattttcattccctcatccattacccgcgcagttaagcgggaaaactatttcgcaacgtcgcgcttgtggctaaaatagccgccatttttcagctactggataagaatgtgaccgtatcttctcatcgacttgaactgttaagcccggcacgcgatgccgccattgcccgcgaagctattttgcacggtgccgatgctgtttatatcggcggccctggttttggtgcccgtcataatgccagtaatagcttgaaagatattgccgagctggtgccgtttgcccatcgttatggtgcaaaaattttcgtcacgcttaacaccattttgcatgatgatgagctggaacccgcgcaacggctgattactgacctctaccagaccggtgtcgatgcgctgattgttcaggatatggggattctggaacttgatattccgccgattgaactgcacgccagtacgcagtgcgacattcgtacagttgaaaaagcgaagttcctctctgatgttggcttcacgcagattgtgctggcgcgagagctgaatcttgatcagatccgcgcgattcaccaggctacggacgcgaccattgaattctttattcatggggcactgtgcgtggcctatagcggtcagtgctacatttctcatgcgcaaacagggcgtagcgccaaccgtggcgattgcagccaggcgtgccgtttgccatacacattgaaagacgatcaggggcgggtggtttcctatgaaaaacatctgctgagcatgaaagataacgatcagactgccaacctcggcgcgctgattgatgctggtgtacgctccttcaagattgaagggcgttacaaagatatgagctacgtgaagaatatcaccgcccattatcgccagatgcttgatgccattattgaagaacgtggcgatctggcgcgcgctagtagtggtcgtactgaacatttctttgttccaagcacggaaaagactttccaccgtggtagcacagattattttgtgaatgcccgtaaaggcgatattggcgcgttcgatagcccgaaatttatcggcctgccggtaggcgaagtagtgaaagtggcgaaagatcatctcgatgttgccgttaccgagccactggcaaatggcgatggcctgaacgtgttgattaaacgtgaagtcgtcggttttcgtgccaatacggtcgagaaaaccggagaaaatcagtaccgcgtctggcccaatgaaatgccagcagatttgcacaaaattcgtccacatcacccactaaaccgtaatcttgatcataactggcagcaggcactgacaaaaacctccagcgaacgtcgggtggcggtagacattgaactgggcggctggcaggaacaactgattctgaccctcaccagtgaagagggtgtcagcatcacgcatacgctggacgggcagttcgacgaagccaataacgccgaaaaagcaatgaacaatctgaaggatggtctggcaaaactggggcaaaccctctattacgcccgcgatgtgcaaattaatttgccgggggcgctgtttgtaccaaacagtctgttaaaccagttccgccgtgaagctgctgacatgctggatgctgcgcgtcttgccagttaccagcgcggcagccgtaaaccggttgctgatcctgcgccggtttatccgcaaacgcatctgagtttcctcgcgaacgtatacaaccagaaagcgcgtgaattttatcatcgctatggtgtgcagctgattgacgcggcgtatgaagcacatgaagagaagggcgaagtcccggtgatgatcaccaagcattgtctgcgctttgcctttaatctgtgcccgaaacaggcgaaaggcaatatcaaaagctggaaggcgacgccaatgcaactggttaacggcgatgaagtattaacgctaaagtttgattgccgcccatgcgagatgcacgtcattggcaaaatcaaaaatcacatactgaaaatgccgttaccgggaagcgtagtggcatccgtaagtccggatgagctgctgaaaacattgccgaagcgaaaagggtaaaacgccagttttctggttactcacaacttattgaatctgcatgatattgcctgccgggtaaggcgttacgccgcatccggcatcaaatgactcaacgttgtcccgcttctggtttgcggcttttttgccagtaaaaatgctcgcgcaaaccttccgcgctctcttccgccacagcacgcaattcatcgctgtccgcttcatgacgcagctgatgatccacattctttacccacacaaattcatgtcctttgtgccctgccatgagttgtccactaaacagagcacacgttaataagacaacgcttaacgccttcgtaaacatcctgccacctttttcttaccttttgccgctatgatgccgatcgtttcttgaggttattattcagttttgcaaattagcgcaaagaaattctggaatcttccttcctgattttgcattgcattctgccgttgcggcgatttagtgctattttcgagcaaattacacacggaggtaaacactaatgtttactttgttgatatactcagcggcagggaggcgatgtgaaacaaagcgagttcagacgttggctcgaatctcagggcgtcgatgtagcgaatggcagcaaccatttgaaactcaggtttcatgggaggcgcagtgtcatgccgcgtcacccctgcgatgagattaaagaaccattgcgtaaagcaatcctgaaacaactcggtttgagttaatcgccaattaaaaaggttaatgacatgcgagagacagtcgaaattatgcgttatcccgtcactcttacacccgcgccggaaggcggttatatggtttcttttgtggatatccctgaagcgttgacccagggcgaaactgtcgctgaagcgatggaagcggcaaaagatgctttactgaccgcatttgatttttattttgaagataacgagcttatccctttacctagcccattaaatagtcacgatcactttattgaagtacctttgagcgtcgcctctaaggtattgctgttaaatgcttttttacagagtgaaatcactcagcaagagttagccaggcgaattggcaaacctaaacaggagattactcgcctatttaacttgcatcatgcgacaaaaatcgacgccgtccagctcgcggcaaaggcgcttggcaaagagttaagcctggtgatggtttaattacagttaacgaaaagttgtcatttttaacaactgatatagactgccgaatcatctgcacataattacgattcgataatgaaaaaataccagcagcttgcagaacaattacgcgagcagattgcgagcggtatctggcaacccggcgatcgtttgcctagcttgcgtgaccaggtggcgcttagtggcatgagctttatgactgtcagccatgcctatcagttgctcgaaagtcagggatatattatcgcacgaccgcagagcggttattacgttgcgccacaggcaataaaaatgccgaaagcgccagtcattccagtcactcgagatgaagcagtcgatatcaacacttatatttttgatatgttgcaggccagtcgcgatccgagcgtcgttccgtttgccagcgcctttcccgacccgcgacttttccccctccaacaactaaaccgcagcctggcgcaggtaagcaaaaccgccacagcgatgagcgtgattgaaaacttaccgccaggaaacgcagaactgcgtcaggctattgctcgtcgctatgccttacagggcatcaccatttctcctgatgaaattgtcattactgccggggcgttagaggcattaaacctcagtttgcaagcggtaactgaaccgggcgattgggtgatagtagagaatccttgtttctacggtgcgttgcaggcgctggagcggctacggctgaaggcgttaagcgtggcgacggatgttaaagaagggatagatcttcaggcgctggaactggcgttgcaggagtatccggtgaaagcgtgctggctgatgactaatagccagaatccactcggatttaccttaacgccgcaaaaaaaagcacaactggtggcgttgctcaatcagtacaacgtaacgctgattgaagatgacgtttacagcgaactttattttggacgggaaaaaccgctgcctgcgaaagcgtgggatcgccacgatggcgttttgcattgctctagctttagcaaatgtctggtgcctggttttcgtattggttgggtcgccgccggaaaacatgcacgtaaaattcaacgcttgcagttgatgagtacgctttccaccagcagtccgatgcaacttgcgctggtggattacctttccacgcgccgatacgacgcccatcttcgtcgcctgcgtcgccagcttgcggaacgtaaacaacgtgcctggcaggcactgctgcgttatctgcctgcggaagtgaaaattcatcataatgacagtggttactttctctggttggagctccccgagccgttagatgccggcgaattaagcctggcggcactgacgcatcatatcagtattgcgccgggtaaaatgttttctaccggtgaaaactggagtcgttttttccgttttaataccgcgtggcagtggggagagcgtgaagaacaggcggtaaaacaattaggcaaacttattcaagaacggctgtaatagcgtttaatttaattcctcttagattgggtaatatgaatttcgaatagcagtcatatttcctaactccttgactatactccagaagataaccttacagacggcataatgcgcggtagctcacaacctgaataaattttctcaggggcgaaggtgtgcctgcaagccgccgtctatggttaaacaaggagatatttttacggcacggcggctgaacaattaattacgacaggagtaagaccttatgagcaagacatttgcccgcagcagcctgtgtgcgctcagcatgacaataatgaccgctcacgccgccgaaccgcctaccaatttagataaaccggaagggcgactggatattatcgcctggccgggatacatcgaacgcggacaaactgataaacaatacgactgggtaacgcagttcgaaaaagagacaggctgcgcggtgaatgtgaaaaccgccgcgacttccgatgaaatggtcagtctgatgaccaaagggggttacgatctggttacggcatccggcgatgccagcctgcgtttgattatgggtaaacgcgtgcagccgattaataccgcattgattcccaactggaaaacgctcgatccgcgcgtggttaaaggcgactggtttaatgttggcggcaaagtttacggcacaccttaccaatgggggccgaacctgctgatgtacaacactaaaaccttcccgacgccgccggatagctggcaagtggtttttgttgagcaaaatctgccggacggcaagagcaataaaggccgcgttcaggcttatgatggccctatctatattgcggacgctgcgttgttcgttaaagccactcagccgcagttgggcatcagcgatccgtatcaactcaccgaagaacagtaccaggcggtgctgaaagtgctgcgcgctcaacacagtttgatccatcgctactggcatgacactaccgtgcaaatgagcgatttcaaaaacgagggtgtggttgcttccagtgcctggccctatcaggccaacgccctgaaagccgaaggccagcctgttgctaccgttttcccgaaggagggtgttaccggttgggctgataccaccatgctgcatagcgaagcgaaacatccggtttgcgcctacaaatggatgaactggagtttaacgccaaaagtgcagggcgatgtggcggcctggtttggcagcttaccggtagtgccggaagggtgtaaagccagtccgttattaggcgaaaaaggttgtgaaaccaacggttttaactatttcgacaaaatcgccttctggaaaacgcctatagcagaagggggcaagtttgttccctacagtcgctggacgcaggattacattgccattatgggcggtcgctaacttcgctggggtgctttatgacgtacgcagtggagtttgacaacgtcagccggttgtacggtgacgtgcgcgcagtagatggcgtcagtattgcgataaaagatggtgagttcttctctatgctggggccgtccggctccggcaaaaccacctgcctgcgcctgattgctggcttcgaacagctttccggcggggctatctctatctttggtaaacccgccagcaatctgccaccgtgggagcgggacgtgaatactgtctttcaggactacgcgctatttccgcatatgagcattcttgacaatgtcgcctatgggctgatggtcaaaggcgtgaataaaaagcagcggcacgcaatggcgcaagaggcgctggagaaagtggcgttggggtttgtacatcaacgtaaaccgagtcaactttctggtggtcagcgccagcgggttgctatcgccagagcattggtgaatgaaccgcgcgtattgctgttggatgaaccgctcggcgcactggatctcaaattgcgtgagcagatgcagctggaactgaaaaaactgcaacagtctctcggtatcacttttatcttcgttacccacgatcagggcgaagcgttaagcatgtccgatcgtgtggcggttttcaataatggacgcattgagcaggtcgattccccgcgcgatctctatatgcgcccgcgcacgccgtttgttgccgggttcgttggtacaagcaatgtttttgatggactgatggcagagaaactttgtggcatgacgggaagcttcgccctgcgaccggaacatatccgcctcaacacccctggtgaactgcaggccaatggcacgatccaggcggtgcaatatcagggcgcggcaactcgttttgaactgaaattgaacggcggtgaaaaactgcttgtgagtcaggccaatatgacaggcgaagaactgcctgccacgctcacgcccggacaacaggtgatggtttcctggagccgtgatgtgatggtgccgctggttgaggagaggtgaatggcgatgaatgtattgcaaagtcctagtcgtccaggtctgggtaaggtgtccggtttcttctggcataatccggggctggggctgtttttactgctgcttggcccgctaatgtggtttggcattgtctatttcggcagcctgctgacactgttatggcagggattttatacttttgacgatttcaccatgagcgtaacgccggaactgacgctggcgaatatccgtgcgctgtttaatccggcgaattacgacatcattctccgcacgctgactatggctgtggcagtcactatcgccagcgccattctggcttttccaatggcgtggtatatggcgcgctataccagcgggaaaatgaaagcgtttttttatattgcggtaatgttgccgatgtgggcgagctacattgttaaagcctatgcctggacgttattgctggcaaaagatggcgtggctcagtggtttttacaacatcttgggctggaaccactgctgactgcgttccttacattacctgcggtgggcggaaatacgctgagtacttccgggctggggcgctttctggtgtttctctatatctggttgccgttcatgatcctgcccgttcaggcggcgcttgagcgtttgccgccgagtttgttgcaggcgagcgctgatctcggcgcacgtccacgacaaacctttcgctatgtggtgctgccgctggcaatcccgggtattgccgctggctctatctttaccttcagtctcacactgggcgattttatcgtcccgcagctggttggtcctccaggatattttatcggcaatatggtttattcccagcagggggcgattggcaatatgccgatggcggcggcattcaccctggtgccgattattctcatcgcactgtacctggcgttcgtgaaacgtctgggagcgttcgatgcactctgaacgcgcaccgtttttcctcaaactggcggcctggggcggcgttgttttcctacattttcccatcctgataatcgccgcctatgcgtttaacactgaagatgcggcgtttagttttccaccgcagggcctgacgctgcgctggtttagcgtggcagcacagcgtagtgatattcttgatgccgtgacactgagtcttaaagtggcggcgctggcgacattaattgcgctggtgttagggacgctggcagctgccgcgctgtggcgacgagactttttcggcaaaaacgccattagcctgttactgctgctgcccattgcgctgccgggcattgtcactggtctggcgttattaaccgcctttaaaaccatcaatctggagccgggatttttcaccatcgtggtcggtcatgcgactttttgtgtagttgtggtgtttaacaatgtcatcgcccgttttcgccgcacctcctggagtctggttgaggcgagtatggatcttggggccaatggctggcaaaccttccgctacgtagtgttgccgaatctcagtagcgcgttactggcaggaggaatgctggcgtttgccttgagcttcgatgaaatcatcgttacgacctttacggcaggtcatgaacgaacgttaccgttgtggttgctcaatcagcttgggcgaccgcgtgatgtaccggtaactaacgtggtggcactgctggttatgttggtaacaaccttgccgatcctgggggcctggtggctaacccgcgaaggcgacaatggtcaataaccactgatacaggaatatgctatgcaacataagttactgattaacggagaactggttagcggcgaaggggaaaaacagcctgtctataatccggcaacgggggacgttttactggaaattgccgaggcatccgcagagcaggtcgatgctgctgtgcgcgcggcagatgcagcatttgccgaatgggggcaaaccacgccgaaagtgcgtgcggaatgtctgctgaaactggctgatgttatcgaagaaaatggtcaggtttttgccgaactggagtcccgtaattgtggcaaaccgctgcatagtgcgttcaatgatgaaatcccggcgattgtcgatgtttttcgctttttcgcgggtgcggcgcgctgtctgaatggtctggcggcaggtgaatatcttgaaggtcatactagcatgatccgtcgcgatccgttgggggtcgtggcttctatcgcaccgtggaattatccgctgatgatggccgcgtggaaacttgctccggcgctggcggcagggaactgcgtagtgcttaaaccaagtgaaattaccccgctgaccgcgttgaagttggcagagctggcgaaagatatcttcccggcaggcgtgattaacatactgtttggcagaggcaaaacggtgggtgatccgctgaccggtcatcccaaagtgcggatggtgagcctgacgggctctatcgccaccggcgagcacatcatcagccataccgcgagctccattaagcgtactcatatggaacttggtggcaaagcgccagtgattgtttttgatgatgcggatattgaagcagtggtcgaaggtgtacgtacatttggctattacaatgctggacaggattgtactgcggcttgtcggatctacgcgcaaaaaggcatttacgatacgctggtggaaaaactgggtgctgcggtggcaacgttaaaatctggtgcgccagatgacgagtctacggagcttggacctttaagcagcctggcgcatctcgaacgcgtcggcaaggcagtagaagaggcgaaagcgacagggcacatcaaagtgatcactggcggtgaaaagcgcaagggtaatggctattactatgcgccgacgctgctggctggcgcattacaggacgatgccatcgtgcaaaaagaggtatttggtccagtagtgagtgttacgcccttcgacaacgaagaacaggtggtgaactgggcgaatgacagccagtacggacttgcatctagcgtatggacgaaagatgtgggcagggcgcatcgcgtcagcgcacggctgcaatatggttgtacctgggtcaatacccatttcatgctggtaagtgaaatgccgcacggtgggcagaaactttctggttacggcaaggatatgagtctttatgggctggaggattacaccgtcgtccgccacgtcatggttaaacattaaggataatattgcagatcgtaagagtatgagatgatcttgcgtactgtcagagcactgatttctctgacagtacgtgctgcgtgcaaaatcactacatcaaataaaccagccaaatctcatagagataagagtaaacaaaccaacagcagcaaagaaatttatcagtactacagttctactggaaacattcatttttgccaccttttatcattgcccctatgtgtatagtacgggttaagaaaatccgcaataatactcattctgaagatggataagggcaagttgctgtttgatgattttttctcaaactggtgaaaaaacttgatgcacgtcaaaaaatgacgcatatttgcgcgcgttttattcatctggctggacgcccgtacatgtctctctatcaacacatgcttgttttttatgcggttatggcagcaatcgcatttcttatcacctggtttctttctcacgataagaaacgcatccgtttcttaagcgcctttctggtgggggcaacatggccgatgagtttcccggtggcgctgttgtttagtctgttttaaatcttactcactggcttgacggcaccacgcagacttatatcatttggatgaatcgataaatttcacaagtggctaaggagaaagtatgagccatctggatgaagtcatcgcgcgcgtggatgccgcgattgaagagagcgtcattgcccatatgaacgaattattaatcgccctgagcgatgacgcggagttaagtcgggaagatcgctacacccagcagcaacgtctgcgcacagcgatcgcccatcacggtcgcaagcataaagaagatatggaagcgcgccacgaacagttaaccaaaggcggcaccatcctctgattaaaaactgcgtctggctaccaaccaggcgccaaccacaagtaaaattgcgccacaaattgggccgaacaacgcccgtagtggtacgccatgactgcggaagatatccagcatcagaccgccaatcagctgactggcgaccagtacagcaatagttgtcgccgctcccacattctgatatccgctgatactggcgaagacaaaaaagcttcccagcaagccaggtataagtgtccaccagcgcacgctggacaccagttcgccaaaccccgccatgccttgtttaaaccataaaatagaaacaaagagcacaatccccaccagactgttcagcaacatggcgatgagaatggtagaggaggtctgggtgatgcgcaccatcagcgtgttctggacaaccagaccaattccggcggcaatcaaaaaagcaagggtgaggctctgattcatccaatcgcgtccggttcagtgcgctcgtcgagttgcaactgcataaatgtcagatccagccaacgaccaaatttagtgcctacctgcggcatttgcgcggtgacgacaaatcccaggctctggtggagatgcaggctggcctgattttggctttcgatcccggcgaccatgacatgcttcccgcaatcccgcgcttcatcaatcaatcggcttaacaatttacgccccagacctttgccctgatgatcgggatggacataaacgctatgttccacggtatggcgaaaaccatcgaaactacgccagtcgccaaagctggcatatcccgtcactacgccgttttcctcgctcaccagcactggataacctgctaaagtccgcgcttcaaaccaggcaatgcggttatcagcatccaccgtttggtcattccagatagccgccgtatacaacacggcgtggttataaatttccgcaatggcagcacagtcggctttgcgggcaaaacggatggacatgtctggcctcaataaaataatgatgatgatgttatcaatactatcgaaaacagcccgaagcaacggattcctcgatgaaattattgcgtgttgcagaggggatgtgacggctgcaaacaaaaccaatcccgtgagcctgctactattgatggattcatgccaaaagcacaggagagcattatggggcaacaaaagcagcgtaatcgacgttgggttctggccagccgtccacatggcgcacctgttccggagaatttccgtcttgaagaagatgatgtcgccacaccgggtgaaggacaggtgttactgcgcacagtttatttgtccctggacccgtatatgcgtggacgtatgagcgatgagccatcttatagtccgcctgttgatattggcggcgtgatggtcggcggtacggtgagccgtgtcgtggagagcaatcatcctgattatcagtctggcgactgggtgctgggctacagtggatggcaagactatgacatatccagtggtgatgatctggtgaaacttggcgatcatccgcaaaatccaagctggagcctgggtgtgctagggatgccaggctttaccgcttatatgggcctactggatatcggtcagcctaaagagggcgaaacgttggtggtagctgcggcgacaggaccagtgggggcgacggtggggcaaatcggcaaacttaaaggttgcagagtggtgggggtagccggtggcgcggaaaaatgccgccatgctaccgaggtgttaggcttcgatgtttgtcttgatcaccacgcggatgattttgccgaacaactggcgaaagcgtgcccaaaaggtattgatatctattatgaaaacgtgggcggtaaggtattcgatgcggtgctaccgttacttaatacatctgcgcgcattcccgtctgcggattagtgagcagctataacgctacagagctaccacccggtccggatcgtttacctctgttgatggctacagtgctgaaaaaacgtattcgcttgcaaggttttattatcgctcaggattatggtcaccgcatccatgagtttcagagggagatggggcaatgggtgaaagaggataaaatccactaccgcgaagaaattactgacggtttagagaatgcgccacagacgtttatcggcctgctgaagggtaaaaacttcggcaaagtggtgatccgcgtggcgggtgatgattaaagtttcaacggcggcgtaagccgccataaaaatccaggcaaaaagcttattttcagctttaattaactaaccacatcattgttctgctgctaataacaacaaaggtgagtggtttatgattattcactttaatacaccaggtgaattccttctgccatgcaggcagggttggacagaaaacacgcgaaggaattaaaatgcctggaacgggaaaaatgaaacatgtcagtttgactctgcaggttgagaacgacctgaaacatcagcttagtattggcgcattaaaacctggcgcacgcctgattactaaaaatctggcggagcaattaggtatgagtattacacctgtgcgtgaagcattattacgtctggttagcgtgaatgcgctttctgtcgcacctgcacaagcatttacagttccggaagtggggaaacgtcaattagacgaaatcaatcggatccgctacgaactggaattaatggcagttgctctggctgttgaaaacctcaccccgcaagaccttgcggaactccaggaattgctcgagaaattacagcaggcgcaagaaaagggcgacatggaacaaatcattaatgtaaacaggctatttcgcttagcgatttatcatcgcagtaatatgcccatcctgtgtgagatgattgagcaactgtgggtcaggatggggcctggtttacattatctctatgaagcgattaatccagcggaattacgggagcatatagaaaactatcatctgttactcgctgcgttaaaagcaaaagacaaagagggatgcagacattgtcttgctgaaattatgcaacaaaatattgctattttataccagcaatacaatcgttaaagtaaatgcccggcaaataccgggcatcaaggtaattactcaaatctccacgcaatattcatgccgacaccataatttcgtccggggctaggttcgtaatatcgcccgttactctcattgacaatgacagaaccaacgtattctttatcgaataaattatcgacacgaccaaataaatccacagttaaattgtggtaattgtatttatacccggtgaataagccgacgagagtataagacggcgcttttgccgtattttcatcatctgccataatatcgcccatataacgcgcttccgtgcctgcataccaaccatcttccggtacataacctatgctcgcaaagcccatattacgggcgatccctggcatccgattaccgttacaatcctgttcattgcaaacattgctgcgataggtcgcatcaagccaggtccaggacgcgtttacgcgaaaatctcctgcgaaacgttgatcccatgccagttcagcgccttgacgacgggtctttccggcatttttgtaagtcgtacgcccaccgctactgctatcgacaacaatttcatcatcagtgtcggtctgaaacaatgcgagactaagcagcccatcaccaatacgcgttttactgccgatctcaattgtatcgttggtggatggttttaaacctaagttcataccgctttgcccatcagcacgataagacagctcattaatcgtcggcgtttcaaaacctcgcccggctgccagatagatattccaggcatcggtcattgcatattttaagctaccggcaggtagccatttatgataactggcatcaccgctgtcatcgccgttacccggagtaacgtaatggtcgttggaatcaaaccacacggagctgtagcgcacgccagcatccaggctcagtttttcgctcagctgccactgcgtctgtaaatagggatcgatgttccacatcagattgcgttcgtcgcgacgcaactcacctttttgcccgtactccggcatgccgctattcaggcggaagttattgtagcccttgcggttttcactcatgttttcgtagttcaggccggtagtgaacgtgaccggaacgcccagttcaccacggtgtgtccagcggctgtctattccctggtaatggcgttgcagggtaatcacgccgcccgcatgactcgggttaagttgtggtgccatgggtatactctggtactgggtcgtttctcgctctccggcatacatcatcacactcatatcatcccggctactcaggctacgctcatagcgcaacccagcctgagtttgcttgatggtttttcgcgtgtcgtactgttctgcacgaggcgcttgttgtggattagccttccattctgctttggttagcccacctgggtcatctgctttgatatccacactattgaaaatcagacttaatttgctggcttcatcaatgcgtacgcccagtttggcattggctaaatttttctgtgcgccactatggtcacgatagccgtgggtcgtaaaacgcgtggtactgacggtgtaatcgacatcgccaggctgtgtgccgtctcccgttgcgcccgttgctttcagcccatagcgccagctgccaaaactgccgtagtaactactggcttcaatggttggtggctgttgtccggtctgggtggtgacattcattaccccaccagacgcgttgccatacagggcagagaaggggccacgcagcacttccacattttgcacactgcttaaatcgatgttggatgtttgcccttgcccgtcgggcatggtggcgggaataccgtccacatacaggcgaataccgcgaataccgtaagtggagcgggagccaaatccgcgaatgctcagctgtaaatcttgcgcatagttctgccggttttgtacctgcaaaccaggcacgccggtcagactttcggacaagttaatgcgcggtgttgccaggcgcatctcctcgccatccaccacgcttactgctgctggggtatccagttcactaaccacctgcggtgcggcactgacaatcatagtctgttcatcagcggcaaaaacaacgggggaaaggacaagcagtgcgggcaaaacggtctgtcggacggaaaaaatcttcatgaaaaaagccaggttaagaatgggaaaacgccgtcatggtaatgaaattgtaaatttatggaaaatgaaacggcacaatacgttaagtaattgagaaaattgtagtcgtaacggcaagaaatgctccacatttgagaaaataatgattaccattcccatttataacaagagcgtaacgatgattacgcttagcgaagcattgtgaagcagcaaaaatatcggttcatcaaagggagtcgtcatgcatttacgtcatctgtttagtagccgcctgcgtggtagtttactgttaggtagtttgcttgttgttagtagtttcagtacgcaggccgcagaagaaatgctgcgtaaagcggtaggtaaaggtgcctacgaaatggcttatagccagcaagaaaacgcgctgtggctcgccactagccaaagccgcaaactggataaaggtggcgtggtttatcgtcttgatccggtcactctggaagtgacgcaggcgatccataacgatctcaagccgtttggtgccaccatcaataacacgactcagacgttgtggtttggtaacaccgtaaacagcgcggtcacggcgatagatgccaaaacgggcgaagtgaaaggccgtctggtgctggatgatcgtaagcgcacggaagaggtgcgcccgctgcaaccgcgtgagctggtagctgacgatgccacgaacaccgtttacatcagtggtattggtaaagagagcgtgatttgggtcgttgatggcgggaatatcaaactgaaaaccgccatccagaacaccggtaaaatgagtaccggtctggcgctggatagcgaaggcaaacgtctttacaccactaacgctgacggcgaattgattaccatcgacaccgccgacaataaaatcctcagccgtaaaaagctgctggatgacggcaaagagcacttctttatcaacattagccttgataccgccaggcagcgtgcatttatcaccgattctaaagccgcagaagtgttagtggtcgatacccgtaatggcaatattctggcgaaggttgcggcaccggaaagtctggctgtgctgtttaaccccgcgcgtaatgaagcctacgtaacgcatcgtcaggcaggtaaagtcagtgtgattgacgcgaaaagctataaagtggtgaaaacgttcgatacgccgactcatccaaacagcctggcgctgtctgccgatggcaaaacgctgtatgtcagtgtgaaacaaaaatccactaaacagcaggaagctacccagccagacgatgtgattcgtattgcgctgtaatagatatggcgagggtgaaaacggtgagacttgcctgccttttatcacggcgtatccggcactttcgtcagtaatctgaatttgcccggcacgtagccgggcaattttgcaattaactcgccgtttcaggcttaaacacaatttcctgtttttcttcatcttcctcgacgactggcgcagtgctgtgaatttcagcaacgcgtttgcgcacaccaaaccagcctataaccagcaaaataccgataatcggcagcgccgcgatagtataagtcccgttcgggtaatcgaacgccatcagcacaaggacactcagtaaaaacagtaatgtcagccaggaagtgaagggcgcgccaggcagtttaaaactgacatccgctgctttgccttctttaatcgctttacgcaggcgcatctggcacacgatgataaacgcccaactagcgatgattcccaggctcgcgaagttcaacacaatctcaaatacgcggctcggcaccagatagttgaggaatacgccgacgacatacacaactagtgtcgccagaatcccggcatacggcacatgctgacgactcattttcgccataaaactcggtgcggaaccgcccatcgccatactgcgcagaatacgtccggtgcagtacagaccactattcaggctggagagggcagcggtcagcaccacaatgttcataatgctgccgatatatggcacacccagtttagagaaaaacgtcacgaacggactttgccccgcctgatacgcgctccacggcaataacataaccagcaacaccacggagccgacgtaaaacaggccaatacgccaaatcacactgttaatggctttaggcaccatggtctgcggatctttacattctccggcagctgtacccaccatttcaatggaggcaaaagcaaacactacgccctgaatcaacaccagcgcaggcagcaaaccgtgggggaagaagccgccattatcggtgattaaatgaaagccagtggtgttgccatccagcggctgaccactaccgaggaacactgtacccacgaccaaaaaggtcacaatggcgagcactttaataagcgcaaaccagaactccatctccgcaaaccatttcacaccgatcatattcatggtgccaacgatggtaagtgcagcgagcgcaaagacccactgcggcacgccgccaaacgcaccccagtaatgcatatacagagcgacggcggtaatatcaacaatccccgtcatcgcccagttgatgaagtacatccagccagcaacataagcggctttctcacccaaaaactcacgggcataagaaacaaaactgccactggaagggcggtgtagcaccagctcacccaatgcacgcagaataaaaaagctaaacaagccacaaattaaataaaccagtgccagtgcgggccccgccatttgcagtcgggctcctgcacctaaaaacaagccggtgccaatcgcgccgccaatggcgatcatctgcacctggcgattgcccatcgctttgtgatacccctcttcgtgggcattaagccagcggcgtttcgcggcgtgttgatcactagtgtcggtgtcgtgtttactcattgctctccctgattgctttaatgaaaaagtcatataagttgccatgaacaatgtttattcatcctggcgatgatagttatcaccattattctttatgggtataaaactatcggcgcagcatcctacccgttatcgataaacgatgcaaaacatccccttacaatcctgaaggggattaatacaactgacgaaaaaatgacaaatccttttgctggttaacctgtgtactgtcctacacttaatctttaaaagattgtgaggggcatatgattaaggtgtatggcgtacccggatggggctctacaatcagtgagctgatgctaacactggctgatattccttatcagttcgttgatgtcagtggttttgaccacgagggagctagtcgcgagttattgaaaaccctgaacccgttgtgtcaggttccgacactggcattggaaaatgacgagattatgacggagacagcggcgattgcattgatggttctcgatcgtcgcccggaccttgcgccaccggttgggcgcgccgaacgtcagctgtttcaacggctattggtctggctggttgctaatgtctatccaacattcactttcgccgattaccctgagcgttgggctcctgacgcacctgaacagttaaagaagaatgttattgaatatcgaaaaagcctttatatctggttgaatagccagctcactgctgaaccttatgcgtttggtgagcaactaacgctggtggactgttatctttgcactatgcgcacatgggggcctgggcatgaatggtttcaggataatgccacgaatatcagtgcgattgctgatgctgtatgtcagttaccgaaattacaagaagtattaaaaaggaatgaaattatttgagtgggataccagaagattatgttatttattattcagtaactttatccacaatgatgggcgtaattaattaaattcatggtatgttttttaatttatatcactctccttttcattcagcgtgtctatttcatttcctctgaaaagaaactaactattcacatcgtgcagatgtttcagttgttaagtcaggcattctataatctcaaaatgtttttaatgatggatatgctcggagttggagatgcaattaatattaatacaaataaaaatatccggcaggtatgctaaaaggataaatggcgttctctgtatttattcgcaattatctgtaggacaaatatggagagcttgatgagtcagagctaaaacagcaattgattaataaacatgttgatttattcaagaaaatggatgtattttaaatgttgattcttaatataacctaatcaatagattatcaagtgagagctacacattattggaggggcaggggaaaacaccattttgggaacaatgcatcaggtactcttaccactgaagcaagatcatccggcaccaggtggtggtgcagtgctttggaaatggtcccctcgggggagttgtcattattttctatgctatttgcttattatattcatcaggtgaatttaataaattcctaatttgaaatatccactattaagctagtgtttaacgacgttaagatggcaatgtgcagatcatgttatcagggtggggcggtagcgtatattccttatacaaaccatcattcatttcaatgattgttattgaattatttattgttgtgaataaaaagacattatgaatattggtttgactttgcatatcaggttttttattactcgctgtaatgtacgagcctgtcgtgaataacgtcgagaacccatccgttgcgtttgtgattattttgttgactaaacagacacccgtttctctgaagtaaaatcccagactaaatcatcacataaccatgacatttttctgatattccccggtaacgccagataacgatgccaaatttaccgttatgttcaatcaactccctggtccatgtcgatttatctaccacaatcgccacgcgtggaggttcaaactccaccggcattgaccaggctgcagccataatgttacgccgctgggattgctcatcgaaactggtgatcaagaccgttgggccatgatttaacagacggctggcatggtgtaattctatggggatgaatcggctcatggtatcgcctcgcgaagaaggtttttttaagcgtagtccgtaacgcaataagtaacgaaattaacgggattggcgatttgcgaacgtgatgcatgtccgcgatcgcacaaaatagccggtgcggcgtctattccaggttataagttgagaaaaccactaagggaaacgcctgatgacgcccattctgaatcactattttgcccgtattaactggagcggagctgctgcggtcaatattgatacgcttcgtgcattgcacctgaaacacaattgcaccattccgtttgaaaacctcgacgttttgctgccgagggaaatacagcttgataatcaaagcccggaagagaaactggtgatagcccgtcgtggcggttactgttttgagcagaatggcgtgtttgagcgggtgttacgcgagctggggtttaacgttcgcagcttgttagggcgcgtagtgttaagtaatccgccagcattaccgccgcgcacccatcgtttgctgttggtggaactggaagaggaaaaatggattgctgatgtcggtttcggtgggcagacgctaaccgcgccgattcgtttagtttccgatctcgtgcagaccacgccacacggagagtatcggttgttgcaggagggtgatgattgggtgttgcagtttaatcatcatcagcattggcagagcatgtaccgttttgatctctgcgagcagcaacaaagcgattatgtgatgggcaatttctggagcgcgcactggccgcagagccattttcgccatcatttgctgatgtgccgccatttgccggacggcggcaagctgacactgaccaattttcattttacccattatgaaaatgggcacgcggtggagcagcgaaatctaccggatgtggcgagtttatatgctgtgatgcaagaacagtttggtctgggcgtggatgatgcgaaacatggctttaccgtggatgagttagcgctggtgatggcggcgtttgatacgcacccggaggcgggaaaataatttatgtcaggttgccggatgcggcgtaaacgccttatccggcatacattagcccggttgtagacctgacaggcgaagcgcatcagacaacggtttcagagttcaattgcccattcggcatgaaacaaaatcaccgctgtgccactaatggtgactttttccggttggttatcacgaattgtcaccgtcacttcaatcataccgtcacgccccaatgcgcgcccctgatggcctttaacacgcaacacgttgccatcgtggggcaatacgttgtgatgtaccaaccatgcacccatcgggccattggcattgccagtcaccggatcttccacaataccaatcgcagggctgaacatgcgaccatcggtttcgtttttgcctgggcggatctggaacgggaagaaaccattgcagccaatctttttgctgatagcggtcagcgcattaaggtcagggctaagggcgtcgatatccacttccggtttcagtgggatcatcactttactgtgtcctgttgttgccacctgaattggcaagcctggcagaatatcgtcctcagtgagatgaagcgcgttgataatcgccgcacgtgtttcaccttccagcggtggctcaaagcccggcgtaccttgttccaggctaatacgataatcatcgttgtgcttttcgatagtcacgcgatgttttcctgccaggcttgtttgccagatcgtgcaatttcctaaacctaacaccttcgcacgtacatagtgcgcagctactgtcgcgtgaccgcaaatcggcacttcaaccgttggcgtaaagtagcggatgcgcacatcgctgtcgtcgctgtgcagcagaaaagcagtttcgctatggcctaactcgcgggcgataagctgcatttgcgcttcgctaagattatcggcggggaaaacaacaccggcagaattgccgcgaaacggttgactggtaaaagcatcgacgtggtacacctgcggtttcattaacgttctcctgtgactggagaactatcatagcctgcaagtggccggagagcgaagggctatccggccagggtgaaattatcgccggctacgcacaatttgatatcgacgagtaaagtactcaaacggcgcgctccacacatgcaccagtcgggtgaacgggaagagcaggaagatggtcattcccaacaccagatgcaggcggaagacgaacgctacgccgttgagcatctcactgcttccaccacggaaagtgacaatgctttgcgcccaacccaccagcttcatcatttcgctaccatcaggatactgtgcactaaacggtatggtacttagccccaacagacactggatcagcaaaatgctcatgatgatgatatccggcgtagtggaagtggcacgcacgcgctgatttgtcagcctgcgccacagcagtcctgcgccgccaatcaacgtcaacacaccgcaaataccgccgagcaccatcgccatgagttgtttcgctgccactggcaaaaaccacgcgtacatccagtgcggcgttaacatgccgaacaagtgcccgaagaaaatccccaaaatgccgatatggaacagattgctccatatcaccatcccgcgtttatcgagcatttgactactggaggcgcgccaggtgtactgcccgtagtcgtagcgcagccagctgccgaggaaaaacaccgtcgcacaaatgtacgggtagatatcgtaaaaaaagacgttcagatactgaatcatttcccacctcccgcactgatgtcgacatattgcggcgcgacatcctggctaaagcgtcgctgatattgattaagcgggctgctgtcacacgccgtggcgttatcttcaataaacttcacctgttcctcttcccacactgcatcaagcgcctggcgggtgtcatcgcgctcttcgctgtttacttgttttgtgacactgtcactactaagggagcttcccgccagttgcagcagagcatcaaacaacgcgtaccacggtgcctcgcgttgttttaagcgaccgccaagcagggcgaggatcggcgcaacattgagcaatccttctttcgcctgatcgtcaggcagtacgcttaaatactccagatacagcggtagataatcgggcagttcccgacaatccagctgcaggccgaccttttcatactccgccagcaggtccaccattgcctggccgcgatcgcgggactcggcatgaacatgttcgaacagcagcaggctcgtggtgcgcccgcggtcaaacacttcgcaccattcggcctgtttatccagcagcggcgcgttaagcaggttgtgggtgaaatccgtaagcatcggcgcgtcgcggcggatcaacgccagcgcgtcctccttgcattcccacaacagctcgtccggatactccatcaacaggccgatcactttgaggatctgcattattcgccctccgctttgtcgcgcacttcggtgatgttgatggcatcgatacggctactgttgaacaggttgaatttactgtcgctaccgtggcaaccgtcgccaaaggtaaaaccgcagccgttgcgttctgcgaaggcatcgcccgccatttcccgatggctggtcgggataacaaaacgatcttcatagttggcaatggcgagatagcgatacatctcttcgacctgggcgacgctcaggcctacttcgtcgatggcacgagtatcagtaacgccttccacggtttgactacgcatatagtggcgcatcgccatcatccgtttcagcgcccgcagtaccggaccggtatcgccggcactcaacatattggcgagatattgcaccggaatacgcaggctttcgatggcgggcagcacgccttcgcttttcggcaaaccgcccgcatctgcgtaggactgaatcggactcagcggaggaacgtaccagaccatcggcagggtgcggtattcagggtgcaacggtagtgccagtttccagtccatcgccattttgtagactgggctacgctgggcagcgtcaatcacattttgtggaataccttgtttcagggcttcctcgatcacactgggatcgtgtggatcgaggaacacttcgcactggcgttcatagaggtcaacttcgcgctcggtgctcgccgcttcctcgatgcggtcggcgtcgtaaagcagcacgcccagataccggatgcgacccacgcaggtttcactgcacacggtcggttgaccggactcaattcgtgggtaacagaagatgcatttttcactcttgccgcttttccagttgaagtagatttttttgtacggacaaccgcttatgcacaaacgccagccacggcatttatcctgatcaatcagcacaatgccgtcttcttcgcgtttgtagatagcgccgcttgggcaggtcgccacgcagctgggattgaggcagtgttcgcacaggcgcggcaggtacatcatgaaggtgttttcaaactgcccgtacatctccttttgcatggcctcgaagttgcggtcgcgggcacgtttttcgaactcaccgcccagcagttcttcccagtttggcccccagatcactttgtccatccgtttgccgtcaatcagactacgcgggcgagcagtaggaatatgtttgccttccggtgcgctatgcaaatgttcgtagtcgaaggtgaaaggttcgtagtaatcatcaatctgcggcaccaccgggttggcgaagattttggttattacgcccatcttgttgcccagacgcgggcgtatcttgccattcacatcacgcacccagccgccttgccactcttcctgatcttcccagtttttcggataaccaatgcccggtttggtttcgacgttgttaaaccatgcgtactccatgccttcgcgcccggtccagacgtttttacaggtcacgctacaggtatggcagccgatacatttgtcgaggttaagcaccatgccgacttgactacggattttcattttttcgcctcctgtacctgatcgcgaccttcatcatccagccagttaacgttcttcatcttgcggatcatgatgaactcatcgcggttgcttccgacggtgccgtagtagttaaagccccaggccagctgcgcgtaaccgccaatcatatgcgttggtttcgggcaaacgcgggtaacgctgttatgaatgccgccgcgcatgccagttacttcgctaccaggaatattcataatgcgttcctgggcgtgatacatcatggtcatgcccggcggtacacgttggctgaccaccgcgcgggcagtcagcgcgccgttggcgttgaatacttccacccagtcgttatcgacaatggtcagttctcgggcatctgtttcgctgatccagacaatcggtccaccgcgagagagcgtcagcattagcaggttttcactgtaggtactgtgaatgccccatttctggtgcggcgtcaggaagttaagtgctttttccgggaagccgtttggcggtatctggcgcatctcactgacgctacgggtgtcgataggcgggcgataagccaccaggctttcaccaaaagcacgcatccacggatgatcctgatagagctgctggcgtccgctcagcgtgcgccacggaattaactcatgaacgttggtgtatcccgcgttataggagacgtgatcgctttccagaccggaccaggtggggctggagataattttacgcggctgcgcctgagtatcgcgaaagcgaatcttctcgtcctctttgtgcagcgccagatgggtatgttcgcgcccggtgatctcgcccagcgcctgccacgctttgactgcaacatgaccgttggtttccggtgccagtgccagaatcacttcactagcgtcaatggcggtgtcaatcagcggacgcccctgtgccgggccatcacgcttggtgtaattgagtttgccgaggaaatcgatttcatcctgggtattccagctaatccctttaccgccattgccaagtttgtccatcaatggcccgaggctggtaaagcgttcatacgtagcagggtagtcgcgctccaccgccacaatattcggcgcggttttgcctggaatcagatcgcattcgcctttgcgccagtcgagcacttcacacggctgactgagctctgccggagagtcatgcagtaggggttgtaataccacgtcggtttctttgccaagatgacccacgcacacttggctaaatgctttggcgatacctttgtagatttcccagtcgctgcgactttcccacgccggatcgaccgccgcagaaagcggatgaataaacggatgcatatcgctggtgttcatatcgtctttttcgtaccaggtggcggtgggcagaacgatatcggagaacaggcaggtactggacatgcggaagtcgagcgtcaccagcaggtcgagcttgccttcaatcgctgcagtttgccactcgacttcttccggtttgatcccgtcgctggcaccgagttcctcgccctgaatcccgctttcggtccccagcagatacttctgcatatactcgtggcctttgccggaggagccaagcaggttagagcgccagacaaacaaattacgcggatgattgctgctgctatctggttgttcgcaggccatacgtaaatcgccgcttttcagcgcctgggcggtaaattctgtgggggataatccggccttgtcggcttcagctttaatcccgagcgggttacgccccagctgcggcgcagaaggtagccagcccatacgttcggcgcgaacgttgaaatcaatcagatgaccgctgtacttactggcatcggcgagcggactaagtaactcctgagcagagactttttcatagcgccattggctggaatgattgtagaaaaagctggtgctgttcatttggcgcggtggtcggttccagtcgagcgcaaaggccagtggcaaccagccggtttgtgggcgcagtttttcctggccgacatagtgtgcccagccgccaccgctttgcccgacacaaccgcagaagatcagcatattgatcatcccgcggtagttcatgtccatgtgataccagtggttaacacctgcgccgaggataatcatgctgcgcccatgcgttttatgggcggtatcggcaaattcacgggcgatggtttcaatatactggcgcggcacgccggtaatttgctcaccccaggctggggtgtacggtttgatttcagcgtaatctttcgcactgttttcatcttccagcccgcgatcgaggccgtaattcgccagtaccaaatcataaacgctgaccaccggacaggtgttgccatcgactaacgtcaggtttttaacgggcaattggcgcaccagcaccggattgtgttttacgctgcgaaaatgcggattttcaatgccgccaaagtaggggaaggccacgcctgcaacagcgtcatgttgaccgagcagggttaagctcaattcggtttccgtaccggcggcaatggattccagattccatttgcctttttctccccagcggaaaccaatgctaccgttcggcactaccaattcacctgcggtattaactgctacggttttccactgcggattgttgctttcgcccagtccatccaccaggtcagatgcgcggatcatgcgcccgggaacgtagctaccatcgtcgcgaggctccagcattaccagcatcggcatgtcgctgtagcggcggcagtagttgataaagtagtcgctgggattatcgagatgaaactcttttaaaatcacatggcccattgccatcgccagggcgctatcagtgccttgtttcggtgccagccactggtcgcacaatttggccacttcagagtagtcaggggtaatggcgatggttttagtgcctttgtagcgtacttcggtaaagaagtgggcgtccggcgtacgtgtctgcggtacgttagacccccaggcgatgatgtagctggagttataccagtcggcagattccggtacgtcggtttgctcgccccaggtcatcgggctggcgggcggcaggtcgcaataccagtcgtagaaacttaaacaggtgccgccaagcaggctcagataacgcgttccggcggcgtaagaaaccatgctcatcgccgggatcgggctgaaaccggcaacgcgatccgggccgtaggttttgatggtccagacgttagcggcggcaatcagctggtttagttcctgccagttggagcggataaacccgccgcgcccacgcacttgtttgtagctcaggcacttttgcggatcgttcataatgcttgcccacgccagtaccggatcgctgtgttgcttgagggcttcgcgccacagttcaatcagtcgtttacgaatgagcgggtatttcaggcggttagcgctgtaaagataccaggagtaacttgcgccacgcgggcagccgcgaggttcatgattgggcaggtcagggcgagtgcgcgggtagtcggtctgttggatttcccaggtcaccagaccatttttaacgtagattttccagctacaggagcctgtacagttaacaccgtgggtggaacgcacgattttgtcgaactgccaacgctggcgatagctgtcctcccagtcgcggttgctatgcatcacctgtccgtgaccatcggcaaaggtttcgcccttttgtttgaagtagcgaaagcgatccaaaagtttactcatgacatgactcctgctccaggaatgaattgggatctgatgccttgtcggatgcgacacggttgtacatcaggcatcgatctcttatttttggctgaacttccgccgaccataaaccagccaggtcagcagcacacaaacgatgtagaagattaaaaacactttcatcgcgccgaccggagagccggtcatattgaggctcatgccaaacgcctgcggaataaaaaagccgcccactgcgccaatggcactgataaagcccagagccgccgccgtttcggtgacggcttcttcatgagcttgctcatcactaccgcctttcatctttacccgataaatggttatctggcgaaagatgacggcgatcatctggaaagtagaaccacttcccagacccgcagtcagaaacagccccataaatacggcgtaaaaggcgatgaaattaccggagcctgtgcccggtaaggtaaggaacagcagggcactgaaaatcgccataaaaataaagttgatcaacgtcacccgcacgccgccgaacttatcggaaatagcaccaccaacgctccgcgcgatggcaccgataaatgggccaaagaacgccaggcgcagaatattcacatccgggaactgggtttttgccagcatggcaaaacccgcagaaaaaccgataaagctaccgaaggtggcaaggtaaagcaggctcagcagccagagatgcaggcgttgtaagacagggagctggtcggcaatactggcgcgactactggcgatatcattcatcccactccatgcggcgatcgtggcaatcgccagtagcggtacccaaatccatgcggcattcgccaggctcatcacgctaccgtcggcctgcggtacgccattgacgccgagaaaggcaaatacaggtacaaaaatgaccagcggtgcaaccagctgcattacacttacacctaagtttcctaatccgccattaatcccaagagcgctcccttgtttggcttttggaaagaagaaactgatattgcccatgctgctagcaaagtttgcacctgcaaaaccgcatagcaaagcgataacgataaatatcccaaaaggagtattcggattttgcacggcaattccgagccagacgcaaggaataatcaggattgcagtactaaaaaccgtccatcggcgtccaccgaatataggcaccataaaggagtagggaacacgcaataatgcgccagaaacggagggtaatgcggttaataaaaagagttgatcggtagtaaaattaaaaccgattttattgagattaacggtaactgcgctaaatagcatccagacacagaaggcaagaagtagacaactgacacttatccagagatttcttcgagcaatatgttttcctttattttcccagaaggccggattttctggtttccagtcgcgcaaaagataacgactatttttctcattttgcagtgccatattgttcctcacatgcacacattggtaatgaaaaaaagacaaaacacgaggtaaggcgcaatagccagttattagaattaaggatgaattgggtgaagtgctgattgaaagaatagataagaaagcgtaaccgcgggggcagaatggggattaagtagccagatatgtgttactaaatgtaactaacaagctaaccttcaaacggggttaatctttgaacgtatgtcatgtttcaacccttcagatcgtgaatctaaagggttacatattaactatattatcaacaagaccagacacttatagaattagtgatgatttattcattaaaaaggccaactactggaggaaaagcttctgtccagaaggtctatcggttcctctcttattgcctgattgtaataatcgttattacagtaagtattgtttatttcatctaaggtcatgtttttaacttttatattcatctggtttacaacttcctctgtcttgtaagtgtgtatattatatggggtatatgcttttttaataggatagtgaaacaattcgttatccacatctattccgtcagagtgaacttcaaatgcaccagggctaagaattgccaggccagtattaagcttaagtgctggggaaaacaaattaaataacatgagctgcatagtagggcaattgttcttcccagaaacatttaaaaaatttaagttttgctctgttttattatggggaataaagttccaatatcggatgtattattagtatcaatgtgggttattttattattgtccagtcttaaacttttgatagatggaagataagtcaggaaatcaagatttatatatttcaactggttgttagcagcgtttaatgtctgaacattgcagaagttgctatagaatattttaatttcagaaagcaaattgttgttaataagtaacgtattcaagttgggaaataagtcattgtgtaaacttgttagtttattatgggatagatccagcagtaagagttcatttttattacctgcaacaatatcagttaattgattatggctgagattcaggtattgcagccattcgcaagattctaattgcacaaactctagttgattatgtgccgcactaaaataagtaacactactaagcctatctatatcaatatttctgagagcattattattcatagatatatgtgtaatacttacatttctgccttgaggaaaatttatactctcaagagcattactattcagacttagctttacgagtctatcgtagttggttgcatcaaaatgtgtgaattggttattatcaagattgatagatgtgaagttttgcagccctggtggttgagtggttaaattaagtccacttaaatcaatggtcacttcattagtgtcatcaattatatttcttactgcagtccagtactgcatttgtgcaagtggatcattgttgatgccgttaactaatacatgccaaagatgtttactacttattagttgatcaatgtcattggttggcagtaaattgttattgcttaagtttaaatattccagttttgtagtgtttttggcgtttaaatgtgcaatatggttgtcgtttaaagtgattgttttcatcctgggatgattgtgtaatataaggtcagtgatcatattgtgatgggcacttaactcaatcagagattcttgccgcggctgccgttggcttcatcgttatagcctttaaaatcatattcccagtgaccaaaaccaatcatttgatcattgatttgcgtttctcctttaaagccgagacgggcataagttttatcaccatcgtcacgcttatcatcagtaaaataacgtagagcggtaaccttgccataaaggtcgagtttattaccatccttgttatagacttcggcagcgtgtgctacgttcgcagctaacaaaccagttacaaccaccgcaactatttttaatttcatttaacagaatccttttaattatcgttaaacgtattttctaaacgaattttaaacggcgtcatttataaatgacatactgtttttaaaatagaatggtgattaaaaacaatgagaaaaatagatgaaataatattatttatcgatatgtgatcgaagtcgaaatgagatataaggtgaattactggtatttgaaatttatttttttaatattgtcggaatttatctgattaactaccgggccgtagacccggcagttattttaaccacgacgtgtcgccagccagcagagcagggaaccgccgcagaccatcagcgcgccttgccagaagctgaagctcagcggggcgctgagcagcacggctgcaagcgcactggaaagtacaggcgtaaaatagctacctaccgccataatggtgacattgccatgcaatataccgacattccatgcagcataagcaaatcctaaggtaaatgccgcagagatgagtttaatcatgacgggcgtgctaaatatcatttctggttgtggcgtaagaaaatagtaaacccacagacttgctcccgttagcaggacaaaaacggtaattccattaaatccgcgtgcgtatttattcgttactgtgcaataggctgcccagataaacgcaccaatgaacgccaggaaataactcaatgggctggtggtgatattattgatgatttcatcataatgtaacccattgtcaccgcctaacacccaacagacgccgacgagggctaataataatccaggtacaatcaaccagttggttttctgaccattaaacagaatggcaaagagaattgtcaggctgggccacagatagttcaccatacccacttcaatcgcctgatgatgggtcgccgcataccctaaggaaagcgccagacagatttcatagctgacgaataacagactcccggcgagtaaatagcctttcgggatttgccgaatacgcggaaatccaaccgtgaagattaacagcagcccgcttaaactatagatagcagctgcgccgccgaccgggccgagcccctcactgacaccgcgaatcaatcctaccatcgtgctccacaggacgatcgctatcagccctatgagcgttgctttttgtcgtgtcatgctcgctgttttgtctctcttgccgttaaaaattaagctgaattttatagcatttttttaactggcctgtcaggcagtggtgcgtttttctaccgctattgaggtaggtcaatttgcgaaggcggattattttgtggcaaacagatgttctttttgatttcgcgcaaaaagattcagaattttactgttagtttcctcgcgcagtaatacccctgaaaaaagaggaaagcaatggacgtcagtcgcagacaattttttaaaatctgcgcgggcggtatggctggaacaacagtagcggcattgggctttgccccgaagcaagcactggctcaggcgcgaaactacaaattattacgcgctaaagagatccgtaacacctgcacatactgttccgtaggttgcgggctattgatgtatagcctgggtgatggcgcaaaaaacgccagagaagcgatttatcacattgaaggtgacccggatcatccggtaagccgtggtgcgctgtgcccgaaaggggccggtttgctggattacgtcaacagtgaaaaccgtctgcgctacccggaatatcgtgcgccaggttctgacaaatggcagcgcattagctgggaagaagcattctcccgtattgcgaagctgatgaaagctgaccgtgacgctaactttattgaaaagaacgagcagggcgtaacggtaaaccgttggctttctaccggtatgctgtgtgcctccggtgccagcaacgaaaccgggatgctgacccagaaatttgcccgctccctcgggatgctggcggtagacaaccaggcgcgcgtctgacacggaccaacggtagcaagtcttgctccaacatttggtcgcggtgcgatgaccaaccactgggtggatatcaaaaacgctaacgtcgtgatggtgatgggcggtaacgctgctgaagcgcatcccgtcggtttccgctgggcgatggaagcgaaaaacaacaacgacgcaaccttgatcgttgtcgatccccgttttacgcgtaccgcttctgtggcggatatttacgcgcctattcgttccggtacggacattacgttcctgtctggcgttttgcgctacctgatcgaaaacaacaaaatcaacgccgaatacgttaagcattacaccaacgccagcctgctggtgcgtgatgattttgctttcgaagacggtctgttcagcggctacgacgctgaaaaacgtcaatacgataaaagctcctggaactatcagctcgatgaaaacggctatgcgaaacgcgatgaaacactgactcatccgcgctgtgtgtggaacctgctgaaagagcacgtttcccgctacacgccggacgtcgttgaaaacatctgcggtacgccaaaagccgacttcctgaaagtgtgtgaagtgctggcctccaccagcgcaccggatcgcacaaccaccttcctgtacgcgctgggctggacgcagcacactgtgggtgcgcagaacatccgtactatggcgatgatccagttgctgctcggtaacatgggtatggccggtggcggcgtgaacgcattgcgtggtcactccaacattcagggcttgactgacttaggcctgctctctaccagcctgccaggttatctgacgctgccgagtgaaaaacaggttgatttgcagagctatctggaagcgaacacgccgaaagcgacgctggctgatcaggtgaactactggagcaactatccgaagttcttcgttagcctgatgaaatctttctatggcgatgccgcgcagaaagagaacaactggggctatgactggctgccgaagtgggaccagacctacgacgtcatcaagtatttcaacatgatggatgaaggcaaagtcaccggttatttctgccagggctttaacccggttgcgtccttcccggacaaaaacaaagtggtgagctgcctgagcaagctgaagtacatggtggttatcgatccgctggtgactgaaacctctaccttctggcagaaccacggtgagagcaacgatgtcgatccggcgtctattcagactgaagtattccgtctgcctagcacctgctttgctgaagaagatggttctatcgctaactccggtcgctggttgcagtggcactggaaaggtcaggacgcgccgggcgaagcgcgtaacgacggtgaaattctggcgggtatctaccatcatctgcgcgagctgtaccagtccgaaggtggtaaaggcgtagaaccgctgatgaagatgagctggaactacaagcagccgcacgaaccgcaatctgacgaagtggctaaagagaacaacggctacgcgctggaagatctctatgacgctaatggcgtgcttattgcgaagaaaggtcagttgctgagtagctttgcgcatctgcgtgatgacggtacaaccgcatcttcttgctggatctacaccggtagctggacagagcagggcaaccagatggctaaccgcgataactccgacccgtccggtctggggaatacgctgggatgggcctgggcgtggccgctcaaccgtcgcgtgctgtacaaccgtgctagcgcggatatcaacggtaaaccgtgggatccgaaacggatgctgatccagtggaacggcagcaagtggacgggtaacgatattcctgacttcggcaatgccgcaccgggtacgccaaccgggccgtttatcatgcagccggaagggatgggacgcctgtttgccatcaacaaaatggcggaaggtccgttcccggaacactacgagccgattgaaacgccgctgggcactaacccgctgcatccgaacgtggtgtctaacccggttgttcgtctgtatgaacaagacgcgctgcggatgggtaaaaaagagcagttcccgtatgtgggtacgacctatcgtctgaccgagcacttccacacctggaccaagcacgcattgctcaacgcaattgctcagccggaacagtttgtggaaatcagcgaaacgctggcggcggcgaaaggcattaataatggcgatcgtgtcactgtctccagcaagcgtggctttatccgcgcggtggctgtggtaacgcgtcgtctgaaaccgctgaatgtaaatggtcagcaggttgaaacggtgggtattccaatccactggggctttgagggtgtcgcgcgtaaaggttatatcgctaacactctgacgccgaatgtcggtgatgcaaacagccaaacgccggaatataaagcgttcttagtcaacatcgagaaggcgtaagggggcgaacagatggctatggaaacgcaggacattatcaaaaggtccgcaactaactccatcacgccgccttctcaggtgcgtgattacaaagcagaagtcgcaaaacttatcgacgtttccacctgtatcggctgtaaagcctgtcaggtggcgtgtagcgagtggaacgacatccgtgatgaagtggggcactgcgtcggggtttacgataaccccgccgatctgagcgccaagtcctggacggtgatgcgctttagcgaaaccgaacagaacggcaagctggagtggctgatccgtaaagacggctgtatgcactgtgaagatcccggctgcctgaaggcgtgcccgtctgctggtgcaatcattcagtacgctaacgggattgtcgatttccagagcgaaaactgcatcggctgtggttactgcattgccgggtgtccgtttaatattccgcgcctcaacaaagaggataaccgggtatataaatgcacgctctgcgtcgatcgcgtcagcgtcggccaggaaccggcttgtgtgaaaacctgtccgaccggggctatccacttcggcaccaagaaggagatgctggagctggcggaacagcgcgtggcgaaactgaaagcgcgtggttacgaacatgctggcgtctacaacccggaaggggtcggtggtacgcacgttatgtacgtgctgcatcacgccgatcagccggagctgtatcacggtctgccgaaagatccgaagatcgacaccagcgtaagcctgtggaaaggcgcgttgaaaccgctggcagcggctggctttattgccacttttgccgggttgattttccactacatcggtattggcccgaataaggaagtggacgatgacgaggaggatcatcatgagtaagagcaaaatgattgtgcgcaccaaatttattgatcgcgcctgtcactggaccgtggtgatttgcttcttcctggtggcgctgtccgggattagcttcttcttcccgacgctgcaatggctgacgcaaaccttcggtacgccgcagatgggacgcattttgcacccgttcttcggcattgcgattttcgtcgcactgatgtttatgtttgtgcgttttgtgcatcacaacatcccggataagaaagatattccgtggctgttgaacattgtcgaagtattgaaaggcaatgagcataaagtggcggatgtcggtaagtacaacgccgggcaaaagatgatgttctggagcatcatgagcatgattttcgtgctgctggtgaccggggtgattatctggcgtccgtactttgcgcagtacttcccgatgcaggttgttcgctacagcctgctgatccacgcggctgcgggtatcatcctgatccacgccatcctgatccatatgtatatggcattttgggtgaaaggaagcattaaagggatgatcgaagggaaggtaagtcgtcgctgggcgaagaaacaccatccgcgctggtatcgtgaaatcgagaaggcagaagcgaaaaaagagagtgaagaagggatataatctcttttgaactttaagctgaaaatggcgctgtaaaaggcgccattttcatattgtagacaacgtaggctttgttcatgccggatgcggcgtgaacgccttatccggcatgaaaacccttcaaatccaatagattgcagtgaacgtgtaggcctgataagcgtagcgcatcaggcaatgttgcgtttgtcatcagtttcaaatggcgctgtaaaaggcgtcattttcatattgtagacaacgtaggctttgttcatgccggatgcggcgtgaacgccttatccggcatgaaaacccttcaaatccaatagattgcagtgaacgtgtaggcctgataagcgtagcgcatcaggcaatgttgcgtttgtcatcagttctaaatggcgctttataaagtgccatttttttattgcgtaaccagacggcgtaatcggctcacatccactgttttttctgcctctgccagactccaggcgttttgcagattcagccacatttgcgggctactgccgatcaccacggaaagtttaatcgccatttctggcgtcaaagctgcttttcctgtcagcaatcggcttgccgtactgggagcaatttccattgctctggcaaactcgcgcagactgacattaagttcgtccagactttcctgaataatgtcccccgggcggggatgattggccattttcattagtgtctttactctcagtagcgttccttcactgggaacactatcattattgttccttcctacgcaacaataatccatttagccatttcatgttggagagtgtgcgatgctgcgacccgaacatggcagtcgcagcaaaggcctcttagtgacggaaatcaatcaccatgcggccacggattttgccttcttccatctcagtaaagatggtgttgatgtccgctaacggacgcagggcgactttcggcaccactttaccttcggcggcaaactggaaggcttcagttaaatcctggcgcgtgccgaccaggctaccgaccacttcaataccatccagcacaagacgtgggatatccaggctcatagactccggcggtagaccgacagccacaacacgaccgcctgcacggacagcatcaactgcgctgttaaacgcagctttagctaccgctgttaccaccgcagcgtgagcgccaccagttttctcctgcacaattttggcggcgtcttcggtgtgactgttaatcgctaaatctgcgcccatttcggttgccagttttaactgctcatcattgacatcaatggcgatcactttggcgttaaagacattcttcgcgtattgcagggcgaggttacccagaccgccaagaccgtagatagcaatccactgccctggacgaattttactcagcttaacggctttgtaggtggtgactcccgcacaggtaatgctgctggccgccgcgctgtccagaccatctggcacttttaccgcgtaatcggcgaccacgatgcactcttccgccatcccgccatcaacgctgtatccggcatttttaacactacggcagagcgtttcgttaccactgttacagtattcgcaatgaccgcatccttcgtagaaccacgccacgctggcacgatcgcctggttttaaactggtgacacctggacccacttctgccaccacaccgatgccttcatggcccagaattacgccggttttgtcaccaaaatcgccattcttaacatgaagatcggtatgacatacaccacaacactccattttcagcagggcttcgccatgtttcagactgcgcagtgttttatacgtaacgtcaacatgatgatccttcgtaacaactgcagccttcatagttcctccttttcggatgatgttctgcatagcaggtgaggcaaatgagatttattcgccactacccagtatggatgagatctgaaaaagggagagggaaatagcccggtagccttcactaccgggcgcaggcttagatggaggtacggcggtagtcgcggtattcggcttgccagaaattatcgtcaatggcctgttgcagggcttcggcagaggttttcaccgccacgccttgctgctgcgccattttgccaaccgcaaacgcaattgcgcgggagactttctgaatatctttcagttccggcagtaccataccttcgccgttcagcaccaatggactatactgcgccagcgtttcacttgcgctcatcagcatctcatcggtgatacgactcgcgccggaagcaataacacccaggccgatgcccgggaaaataaaggcgttgttacactgggcgatagggtagattttatctttccataccactggattaaacgggctgcccgtggcgaccagcgcgttaccttcggtccaggcgataatgtcctgcggtgtggcttccacgcgactcgtcgggttagacagcggcatcacgatcggacgcggacagtgtttatgcatctcacggatgatctcttccgtaaacagcccggtctgtccactgacgccaatcagaatatctggttttacattgcgcaccacatccagcagactcagcacatcgctgtcggtatcccagtcactgaggttttcgcgcttctgcaccagtttggtctggaaaggcagcaggttcggcatcttgtcagtcagcaagccaaagcgatcgaccataaagactttctgccgcgccgcttcctcgcttaatccttcgcgctgggtctgggagatgatcatttcggcaatgccgcatcccgcactacctgcgccaaggaagacgatttttttctcgcttaactgaccacctgccgcgcggcttgctgcgatcagtgtgccgactgttaccgccgcagtgccctgaatgtcatcgttaaaagaacaaatttcattgcgatagcggttaagtaacggcatcgcatttttttgagcaaagtcttcaaactgcaacagcacgtctggccagcgttgtttcacagcctggataaattcatcaacgaattcatagtattcgtcgtcagtgatacgcggattacgccagcccatatacagcggatcgttaagcagctgttggttgttcgttccgacatccagcaccaccggaagggtatacgccgggctgatgccgccacaggcggtatagaggctcagtttaccgatcggaatgcccatcccgccgatgccctggtcaccaagccccagaatgcgttcaccgtcagtcaccacaatcactttaatattatggttcggcacgttttgcagaatatcgtccatattgtgccggttctggtaagagataaacacgccgcgactacggcggtagatctcagaaaaacgctcacaggctgcgccgacggttggggtataaataacaggcatcatctcatcaagatgattgtttaccagacggtagaagagggtttcgttagtgtcctggatgttacgcaggtagatgtgtttgtcgatttcggttttgaatccctgatactggatccatgctcgttccgcttgttcttcgatggtttcgaccacttccggcagtaaccccagcaggttgaagttacggcgttcttccatgctgaaggcactgcctttattcaacaacggaaattccagcagtacagggccagcgtaagggatataaaggctacgctgtttttttgtttttggttccatgtcactcactcttttttgaatatccatccctggggggcttttatcgtctttgctttaccgccagggcgtcggcctcaagtataaagcagataaaaacaaaaacaccattgcgcaggcaatggtgtttaatcgtcattgaggactgatggttatgaattacttttcagcggggcgttttctgccggttgggttatttactacgctggatttgtcaccttcggtaactattttgcgctggttagaaattttatggtccagtccaagaatatgacgtgcctgacggttgcttttcattttaactcctcaatcctgtagctagttttaaggacaacatcgccgtagcgaagaaacacgtgctaaacccctaaattaggttgccgatcaagcatagcaccttaaagcgtagggtgctggccactgaccacataattgatcgtttgctggtagatatcactgaggatgtcgttatcagaagcttcaacccatttggtcagctccatgagaatgtcatcttcagtgacaacaccatgctgtgcccgaaggccttgctcaatggcattaaccagagcgggttctgctgtactattttctgcctgataataagtaaacatagtgattctccgtgtctgtgtatttatggtgtctgctacggatcgcagatttataaagcacattcagcatggcaaatatttgccgcttcgttgttaagattagtcctggttgatgatttttatattttaacaccatgatattcatagggattgtgattggtatgatccgattaatattgatacaatatcttttgggttatatattcccggtaatctattgtgggaatttaatttaagtgcagaagtaatattttcgccggattttattcggaatatcctgcttatcctcgtgctgtttctcacgtagtctataatttcctttttaagcccacaggagagcaacaatgacaatccataagaaaggtcaggcacactgggaaggcgatatcaaacgcgggaagggaacagtatccaccgagagtggcgtgctgaaccaacagccgtatggatttaacacgcgttttgaaggcgaaaaaggaaccaaccctgaagaactgattggcgcagcgcatgccgcatgtttcagtatggcgcttagtttaatgctgggggaagcgggattcacgccaacaagcattgataccaccgccgatgtgagcctggataaagtggatgccggttttgcgattacgaaaatcgcactgaagagtgaagttgcggtgccgggtattgatgcctctacctttgacggcataatccagaaagcaaaagcaggatgcccggtctctcaggtactgaaagcggaaattacgctggattaccagttgaaaagctaaagcattgccggatgacgcgtcaggcgcgtgaatgcctgatgcgttgttagcatctttacagcgcccgccagcaccggagctcacgtccgtcctcccttattgctaaactttgccggacttcacatccgtgggttgccagcgggcaacgttcgtagaaaaaacagccttgcggcaacgtgcggtttcccggcagatccgttttacgtaatgcccattcttcctccagcggtttatcaatggcggggagggaatccagcaataatcgggtgtatggatgtgcaggtgccgtcagcacctgctgcgcgtcgcccagttctacaatctgcccgagatacatcaccgccacccgatcgctcatatgacgtatcacgctgacattgtgactaatcagcacataggtcagcccgtgattttcctgtagcgttaccagtaaattgaggatctgcgcctgaacggagatatccagcgcagaggttggctcatcaagcacaatcacgtcaggctggctagagagtgctctggcaatggcgatacgttgccgctgcccgccggagaacgcatgaggcaggcggtcgagatactccggacgaatacccacctgcacagccaactcctctgccaacgctcgccgctgttgttcactactacgcttagctatccagagcggttctgtgatgatgcgccacaccggtaagcgcggattaaggctagagagcgggtcctgaaacaccatctgcataatgcgttgactgccagaacggatgtactgcccgtggctcggttgcagcatacccattaaaagctgtgcgagggtgcttttgccgcagccactctcgccgacgatccctaaggtttcaccacggcggatctgtaaatcaataccattaatggcatgaacatgttccgtagttttaccaagccagtttttacgggccgggaaattgatatggacgtcgcgtaacgttaataacgtgtcagacacttataacctcctgctgcggataccaacaggcacagcgctggttgttgtcaccacacgctgtcagcgccgggacgttttcacactgtgcacctgccgcatagcaacgatcgcgaaaagcgcagccgtcaggcaaatgggtgaggtttggtaccgtccctggaatggcgggtaatagctggcgtggtactccatgttctggtgcgcattgcagcaaaccaatggtatacggatgccggggatgatggataacgtctgccgtcacgccgctttcaattacgcttccggcatacatcacgtaaacgctatcgcacagttggctcaccacggccatatcatggctgatgaacagaaccgcagttccactggcgcgggctttatgtttaagcaaacgcagtacctgcaactgcaccgtgacgtccagcgccgtagtcggttcgtcggcaataatcaattgcggctcgcaggagaatgccagcgcaatcattacccgctggcgcataccaccactaagctcaaacggatagcggctcataacttccacggcatccgggatttgcatctcttccagcaggtcaatcgctttagctctggcttcccgacgacttattggttgatgatggcggatcacgtccatcatctgaagacctattcgacgtgtcggattgaggtcggtcatcggttcctgaaagatcatcgccactcgtgcgccgcgccactgacgaagctgtttttcccgcgcgttaagaacatcttctcccagcagggaaatctgcccccgatgtacgcaataactgcccgtcggtagcagacgcataatcagcattgcggtgacacttttaccactgccggattctcccaccagaccgacaatttcaccgcggttaatctgcaaggacacattgttgagcgcgtgaacatcaccgttaaaaccggggaaactcaaatgcagttgttgaatgtccagaacgggttgggtcatgactgctttcctcctgctttttagttcaactctgctttcctcctgctttcgggtcaagcagatcgcgaataccatcaccaaagagattaaacccgacggcggtaagcaaaatcgctgcccccggaaatgcgcaataccaccactgatcgagtacatagttgcgaccatttgctaccatcgcgccccattcagcactcggttgttgagcacccaggccaataaatcccaacgtggcggccattaaaatcgcgctaccgatatccaggcttgcctgcacgatcagcggcggtagggagttacgtaaaatatgccagttgatcagatgccaacgagacgcgccaaaggttttcgccgcctgaacataggtatactggcgtacaactaatgcttgcccccgcgccaggcgcacataaaagggaattcgcacaatagcaatagccagcatggcgttaaacaaactcggcccgagagcggcagccagtgccattgtcagtaccaagctaggaatgctcagcataatgtccatgatgcgcatgatgatggcgtctgcgcgtccaccaagcacaccggatagacatccgagtaggctaccaatcatacccgcaatggcaaccacgactaatccggcgagaatactttgctgactgccgaccagtacgcggctaaacagatcgcgtcccacttcatcggtgccaaaccagtgcgccgcagaaggcggcaaaaggcgggcggttaaatcaatggcgttgggatcatgcgtcgccagccacggactaaaaatcatcatcaatagcattaatacaatgatgactgcgctggtcacggtgagcggactgcctttcagcatccataccagttttgcaccgttaaatcgcgtttgtttttgtgggcgtacggcggacgtttcctcgcttagcatcattcaccacctccacgtccgatacgcggatcaatccacaaatagagcaaatccaccaccaggttgaccagcacataagcaaaactaaccacgacggcaaagcccatcactgccgggaagtcgagcgcctgtatacttgttactacccatgcacccattccgggccaggcaaaaacggtttcggtgagcactgcgccatacaacaaatcgcccagcgccaaacccaatacggtaatgcttgggatcaacgcattgggtagcgcataacataaaacgatataccagccgggcaagccgctggcccgggcggtacgaatgtagtcttcactcaattgttccagcatcgcactgcggatctggcgagcgacaattcccaggtgaacgaacgccagcgttaatgccggtaagatgagatgttgcaacgcattgaagaagacttcaccgttgccttcaagcagcgcatcgagcagataaaagccggtaacgtgcgttggtggatccagccagtcatcaagccttccgccgccgggaagaatttgcagatgaccataaaacagcacaatgacgcccagcccaagccagaacgcaggtgtggagattccggtaatggccattattcgcaccagatgatccagccagcgatttcgccagactgcagagagtatgcccagcgggatgccaatcaggagtgccagcagcagggcaccaaaagccagctccagcgtcgccgggaaaaatatacgcaactcttccagcaccggacgcccggtacgaatggatgttcccaggtcaccatgaaacaggtcgctgacgtagcggtaaaactgtacatacagtggctggtccagtcccagttgctggcgaatattttccacgatagcatcgctggcgcggtcacccgccagtaaccgcgccggatcaccagggatcagatggctgataataaacgtaatcacgcagacgcccgccaccacgagcaccagcccccagcagcgttggcgtaaaatactccagaaggtcacgttatttactcatggtattgatattgaagacctgttccagcatgggattgaacacaaagcctttcacctctttgttcatcgccagttggtagtttttctggaacaggtacacataagcagcgtcatcaatgacgattttctgtgcctgctggtagtcccgggtacgctgcgtctggtcggtggtcgcaagcgcattgcgcagtaacttatcgacctcactgttttcatagaagctgcggttacccggcagaccttttttgtcactctcaaaccagtaattcataaacatatacgggtcggcaaaatccggactccagttgccaatcgcaatgtcgtaatcacctttacccactctgtcgcgcatggtggcgttcgccagcttttccagcttcacaatgatgcccagcttgttgagactggattgtgtcgccagagcaataggctcccagttcggatcgttatcggagtagagaaacgtcaggctggtgggtttgctcgtcactttatcccattcggctttggctttcgtttcgtcatggttgtattgcattgccgtcgcatcgtagccccacatgccttccggaatcgggccgcgcatctgttttccgttaccactcagaatgccgttaaccatgccctgataatcggtagaccaggaaatggcccgacgcagatccgcctgattaagaggcgctttgctgttattcagatacagataggtaacgcgcagactcggatactctgccacattgactttattttcctgcttcagggcgttgagttgatccaccggcagcgcatcggcaatgtcaatgtcgccacgggagagctgcaggcgacgggaggcactttcaccaataatttttacgcttacccgtttgaagttcggtttattgcctgggtaatgcggatttggcaccagaactaattgctgacctttttgccagcttttcagcataaatggtccggaaccggcggtattttgcgcgaggaagccgcgagcatcatccgctgcatgttcctttaagaccgccggattgataatggatgcaccgtcattcgccagcgtgtagaggaacggtgcgaatggttggctaagggtaaacttcaccgtatgttcgtcgggagcatcaatctttaaatctttgggaaatgcttctgctggcccctggccgatttttagtagccgctcaaaagaaagttttactgcttcggcagtgacaggtgtgccatcggcaaatttagcattatctttcagggtgaacgtccactctttttgatcgtcagacgctttccagctacttgccagatcgccttcaacgtcggtactgcctttatcaccgtccgttttgtactgaaccagccgctgataagacgggtaggtcactgtccagtcgttattatctattgttaccgccgggtcgagggtttgtggatcggcggccttaccaatcaccagcatatcttttggtacggcggcgtgcgcaaccgggaaatttgtggcaaggacgagcgcgagcaatgtgggacgaaagcttatgcttctcttcatgacagtttcctgattaactgacgtgctgtgtgccaggggatataaaacaagagaattgatcagcgagcagagggtaactcgctgcctggggtaattcgaagtgccaccattcgctggagataccgacaaaaccgccaccagtcattatcgcattcagcaacagccgattgcgctgagcggcgggcgggacggaagggtgataggcatgggagcgctcgtgcatttcatcgaaccctgcgcccatatcgaggatgttcccgtgctcatcacgaagcgtcaggtcgatcgccgtgccacggctgtgattagaaccgaccgtcacatcaacaacatattgcgggtctgggcaggcttgccacaacatcgcctgtgcttgttgtgggcgatacgcatcgtaaatcaccagttgtaacccactcagctgggcgatgctgatacttttcgccagcgcggtaatcgcatccttgtgtaacagacaacgcgcttgctgataaatagctttacctgtgatgttatcagcgcaggcgtatttcaattcgatctccagatcagggaagattacggctaaatcaaccagttcggtggtatcgctcataaacggttcctgtataagacaaaaattgctgcgctttccgcttatgcagatctcatgccatgccgggataagcgccagaatgctggcttaaagttatattttttaacttttgatcaacatttgtgcagcgtagtgcagttttggtgcaagaggggaagttaaggaaggaatctcccggaatcgtagctgaaatcacagtatttaagtgacagtgtcacgttaaatgaaaacccgcgagtgcgggcgagaggaatttgtcagattttcagcggtaacacgctgctcatccagcctggaatttcttcggcgggtagggggcgggaaaagaaatatccctgaataacgcgacagtggatcttgcgtagcatctcaaattgctctttggtttcgacgccttccgccacgacggttaaattgaggctttgcccaatgctggtaatggcttcaagtaaggcaaggatgcgtttttcggtcagacaacgatcgacaaaacttttgtcaattttgatttccgttaccggaagactgactaagcgggataatccggaaaagcccgtaccaaaatcatctacgcttaagcccacgcccatatcacgcaggatctgaatgcgcttaaagatttcggtatcgtgttccatcatcatgctttccgtgatttctaccgtcagctggtggccgtcaataccccaggcgtgcattgcatcagacacctgattaggcagttgattactgcgaaagtgcagcgcgctcaagttcacggataacgccgggatatgaatattctggctacgccattctgctaactgacggcaagcttccgcgatgacccagcgcccaatattttcgatttcaccaatctcttctgcgagaggaataaaccgactagggggcacatgaccatgcaggggatcgtgccagcgagcaagggcttcgatgccgtacagttcacccgtttctgcgaagatttgcggctggtaaaccagtttcagttggttattgctaatcgcttctttcagcgctgcgcctaaaaccaaacgctcttttaccatttcgttcatcgccgggctgaagaactgccagccgttaccgccattcttgcgaatataatccattgcattgtgagcagtggagagcaagtaatcgcggtttttacccaggtcgtagctgatgccaatactcaaggtaagcgggaagggtttatcgtcaatcattatcggcttgctgaccacattccgtagctcatcggcgatttgggtaatgttactgacgtcgttttcgaggctcacgaggacaaactgcgtaccttcgatacgacagagatactgatccggtttgagtttttcacgaaagcgattgaccacttccagcaatgcctgatcggcccacgcatagccaaggctatcaatcacatcctgaatatggtcaacaccgatgagatacaccacgggagagacggctttgtcgaccaggtcatcgaggtaattgtgcaggttattgcgatttggcagaccggtcatcggatcaaattggatgagttgttcaatatgctgacggcttttttcctgttccagcgccagcgcggccatatgctggctgatatctgccacgcgttcgataaaggcgctggtttctgctccactgctggttttaatttgcaggatccccgcaggcgcgccatcacgctgacgaatggtcgcactccagctttgcgcattttgaatttctgcaccgtgggaagaactcgcccagtgtatcggcatcccgttgcgcagtgcgaacaggctaacatggctttcgttgagtacagattcgatgttacgacaaatgatttcccccatttcatgaaatggcgggctgctgcacatggcggcgagaatattgccttcaagctggcgaatctgccgttcttcggtgatatcgctgaaagtcattaccaggttctgcagatgcgcgagcacgtcataaaccgggctgatagaggctttaatccagattttttcaccggtgcgcgtcaacagcagaaattcgtcctgatcgcgggcggttttccatagcaactgttgtaaacgaatgcggttatcggcagggaattcaggaatgttcaggagtgtatcgggctgcataccgctggcttcgctaatgcagtaaccaaacatttcggtaaatgcgcgattgcactgcacaatatggcgttccggatcgaggacaatcaccggtcggtcgagatggtcaacggcaataatcaattgtcgggtctgttctttttgcgccatttctacgctggcatcccgtaccagcgccaggtaataaactttcccctcggcgctcactttgcttagcgcaaaacgggtccagattttactgccgtcttttttctccagctgcagctcccgactcatcccctcaacacgcgctttaccgccttcacggttgtgacgaatgtattcaggatgcgcaggacgcaaatcccgcggaatcagcatatcaatgttattgccaatgacttcttcacgtttgtatccccagagcttctctgcggcggggttgaaaaacatcacttcatcattttcgttaattaacaccgcacccatcatattttgctcaagggcggggaaaaaaatgccatcggcggcattatccgcatcggttagcttcatgattacctctgcatcctggcgcatttaaagactggctttccagagttcaacacggtttctacctcgtcttttggcgatatacagagcttcatcggctatttgaatgaggcgctcatagtcaggatgaccattaaacatggcggcaccgatggaaagactgagggcaatatcttcgccgtttgcggctttcagtttggttttctccacccgactgcgaatacgttctgcggtacgtaacgtttcgttttcagaagcttcagtcaaaacaatgataaattcatcgcccccgtagcggaaaacataatcactactgcggacgttgtcataaaaggcctgagagactttacgcagaatttcatcaccagtgttatggccccacgtatcgttgatctctttgaatttatcaacgtcaataatcagcacactcagcggtgtaccggtccggttggcatgggcaatttcgcgtttgaagatagtcggtaggaaacggcggttaagtaatttcgtcagtacatccataccgacttcgtggcggcttacttcttcaaacaattcacgcagcaaggtaataatttggcttacggtatttcttatctgtaataaaaatttcacccgcagacttctgttattcaaatttctggtgttacgcatggtttgattgaaaataccgtcgaaatcctgaatcagacgggagatatggcctacttcggcaataccactaaaataatgtcgacctttatggttaaaccacaggccaaaatcagcctggcttaaaggcaaactactgcctaaatcagaatccagcaggattttatagataatatctatttcccaactaagtatactggctatttgccgttctttttcttcttcggcgttttccagtaagctgaagatacgatagttttcatcttccttactggcactactgtcactaaaggtaaacgcgcgagtcatcacttccatcgcgatatcaatactgttaatgctgaaatggtagacctgaagtttttctgcggcggaataatcgctagagaagatcaccggatagaggatttttttcagcacccgaaaccccatctcgacaatttctaccggaattcctatgcgggcatgcacttccgcgacggtatgctggatttgtattagcctttcgacatcgtcaacctgggcagaaagcacgttaataatccagcgttccatcgcactcttcaactgccgctcaacttgttcattactcaagaattcttcggcatgcgggtcgatgcggacaattcgataaaactcgatactcagataatgagcatgcgcaacggcaatttccgcggctttagcacgaatgggcggatctgcctgttcgacaagtccggtccactcatctttcattcttttaaaatacatctccataattcacacccttataaggctgggaaatcagacggaatcaaaatgaaacgcaacgtgcgagatcgactaactgcaccatattctcctgaaatatgaagatatactgaaaagaaataagcgatttaggacagtttcaatctacgctactgttcttcagaagagtatagcccatcgtaattatttttcggtgacagcgaatatcgtatggtttttcatattcatacatttttattagggatttatggctgtttaactaagtgtggttaatttgacttaagtaagcatgattattagtgggatagtttaagagggtaacaagccggtgggtaaagcaccggcttgttacaaagtaagaatgggagtttaactgccccagcgactttgcagatagctgaccgcttgttgagtctgcggtttattcagatagtcctcacggaacaagatggtgccgctaatttcgggcacagcatcgttaagatcgagctgctttttcagttccggtacgccgccgttaatcatccagtctggctctatcttactaggttcacccactttatagaaggcgataccgatatacaggcgggtcctggtcggtttaacgacatccgcccaccattttgccaacacgtcataacgcgcggcactccgactgaacggccagtaaatttggggagcaatgtaatccagcaatccttgttccacccatcgacgggtgtcagcgtaggattcgtcataggctgccgcgcctcgggtatcggaaccgagcggatcgtgacttcggttacgccacacgcctgccgggctaacaccaaattcgactcccggcttaatgcttttaatggtgtggcttacctttgcaattaactgctgagtattgttgcgccgccagtctgctttactcgcaaatgcgcctccgtatttacggtacgtttcgttatcatttagccgactacccggactctccgtatagaaatagtcgtcaaactgcacgccatctacgggatagcgggaaaccacttctgcgactatacttgtgatccagtcctgaacctcagggatgcccgggtcgaggacaaagcgatcgccagacgttctgatccagtcgcggtgttgcacatagacgctcgccggttgttgagacagagtgctattcagttccctgatagtaccgggcttcgtattaacgcttacgcgataggggttaaaccaggcgtgtactttcatcccacgcttgtgggcttcgtcgagcataaattgcagcggatcgtaacccggattttcaccaatcttaccggtcataagatcggaccacggcaaaattttgcttggccacagggcggtaccgtccggcttgacctggaaaaagaccgtgtttatgccgagacgttgcagatgatccagtttgtcgatcatcgcctgttgttgtacacgggcccggctggtggggttactaatgttaacgctggaaaccggtggccagtcgagccgagaaaccgtggccagccagatgccacgcatcggttgactgctttgttgcgtcgtggctggtggcttactacctgctggtggtgtcaccatggactctggaggcgtgcttttacaactacacagtaaaagtgccagtgcaactagtatcgctggtcttctaatcgttaatttcttgtttcgggagcagatatccatatgtgctggtttccggtaaacagatgtgcgctcattctcgtacttatccccgttaagtcaatacgacagcaagcacgaaaaagggagcgatgaattatcgctcccttgtcttataaccattcagacatggttagtgtttcttgtcattcatcacaatatagtgtggactacgtgcacgcgggtgcagggagaagtgaccttttggtgcgttctgactgttgattggctccagagtgacgccggtatttgctttgcctttacgatcatgaacagcatagagaataaagggcagggcaagtaccaccaggaaactaacaaccagtaattcaacatacatatcggtagaatcaccctggatgttatccggcggcaggaaggaaacaataaacgccataatactagtcagcagaccgacaattgccacgaccagtttcacccctttaccaccagggatattaaatgtgcgttttaagtcaggatgtttaagaaccaacacaatgtagccaataaacagcatgaaataagcacacagataaatcaccaccgtcagcgccagtgcgatcaggaaggacatgttgttaccgccaccggtattggtgaggatgatcaacgcgatagacgtaatcaccagctggctaatgaccagcgttaccggtacgccatttttgttcattttagcgaatgccgctggcagcaggtttttctgcgctgttacatacatcccgcgagaaggaccaacaatccaggaggcgatttccgccagaacacccagcaacagcagtgcggagatcacgcgaaccgtccactcaatttctggtgccacatgggacatcagaacggtaaaggtttgcattacccctgcggagaggttgatttcattacccggaatgaccatcgcaatagacaaaccaccaacagagcttaagcagattgccgccaccatcagcagtaacatagccaacggatagtcgcgccctgggttgctcatttcattgacgtgggttgcggatgcttctacgcccatataactcaaaatgaaggcaacaaatactaccagggtgcccactttagagaagtcagggaagaaggtcttgctatccatttcgatagcaacgggggcaccggagtgcagataaatagccgctaatgcgatcaaaataaatgcaggtaacaggataccggcgaagaagccaactttagcaattcgcgccgtgtatttcgtgccaccaaactgcgttaatgccagcgcccaaagaatgatgagtgctgcaatagttttggtaatggggtcttcattcagcgctggccatttcaggatgtaggagagtgcccctaacacgaaatagagcatcggaataaaaccaatggcgatttgcagatagccaaaactgatcgctgcaaatccccatctcggccccagagtattacttacccaggcgaagacaccaccttcttcccagccgtcgacggtggccatttccgcagcacaaagtcccacgggaataaaccataaaatcccgcctaatagcaggaagaagactaaactaaagccgcttgttgcgaaggtagggtattcataaacagccattaccatgcttgccgttatggcaaagaatccaagtaatgtgagctgcttagctttacctgtctgtacacttgtagccatattatccccctaaaacggtattcctgtcggaaccgcacctgttttgttctgaagcgtattcagaacaatattttccgttgctaatgccagtgaacagactttggaaattgtcccgaaacgggttcgtttcgggacaccgttaccgttaaacgttatcaggtatgtttaaagctgttctgttgggcaataccctgcagtttcgggtgatcgctgagatatttcagggaggctttgtagtcttccagcaacagttcagcaaagtccatttcgaagccgcgacgacacataatgcgcatcaccacgatgtcggtggcttcaccgccgagagtgaaggccggaacctgccagccgcgcagacgcagacgttcagagaggtcatacagggtgtatcccggatcttcaccatctttcagtttgaagcaaaccgccgggatgccttcgtccgggcgacccgtacagatgaactcatacggccccagtttggcgatttcatccgccagataagcggcaacctggtaagaggcgttctgtactttggtatagccttcacgaccgaggcgcaggaattcatagtactgtgcaattacctgacccgccgggcgggagaagttgatggcaaaagtaccaatttgaccacccaggtagtcaacgttgaacaccagttcctgcggcagcgcttcttcgtcacgccagataacccagccgcagcccagcggagccagaccgaatttatggccactagcactgatgcttttcacacgcggcaggcggaagtcccagacgatatccggggcgacgaacggtgccaggaagccaccgctggcagcgtcgatgtgcatgtcgatgtcgataccggtatcggcctggaatttatccagcgcatcgtgcagcggttgtgggaactcatagttaccagtgtaggtcacgccgaaagtcggcaccacgccgatggtgttttcgtcacaggcttcaatcatgcgtttcgggtccataaacaactgaccggggcgcatagggatctcacgcagctccacatcccagtagcgggcgaatttatgccagcagatttgtaccggaccgcacaccaggtttggtttatccgttggtttgcctgcagcttccatacgcttgcgccaacgccatctcatcgccatcccgccgagcatacaggcctcggaagaaccaatggtgttggtgccaacggcctgaccatttttcggcgcaggcgcatgccacagatcggcaaccatatttacgcaacgcaggtcgatggctgcggattgcggatattcttctttgtcgatccagtttttgttaatggataaatccatcaatttgtggacattttcgtcgtcccaggtctggcagaaagtggccaggttctgacgagcgttgccatcaagatataattcgtcattgataatctggaatgcgacatcgtcgcgcatttcgtgcagcggaaaacgtttactttctgcgatagtggaaatagacttcgcaccaaaacgactatcgagtagttcgctccttaaatccgttacttgcttcttatccattttaaactccttaaaatgattggatcgcattaaaaaagtaggatttatcgataaagtaagcaagtgcaaaggactcgtgtttaaataacaaaatcctaatgttatttatcgtgagatattacgcgaataatattttttcattgaaaaacaatacaatatgaaattcttgggtggtggtaaggtgttttatgctgttatttttatgcgcattctgtgtctcctgaattatcacgtaaaaatcagaccttaaaatatcactattagtacttgattattattttgaacgcatttataaaattattacataaaaatagcgaatattgctaaaatccccgccaacgatgtgttgacggggctgttattattttggcaataatactccggtataagtatttaccggatgagaaagatattgtttaacggcagtgttaacattctctaccgtcatttgtttcaacaattgctcctgctcagtccatgctgcaggatcgtcatattgaataagactatttacaatagtgttcgctaattgttgaacgctacgctgttggatatcgaggctgcgctgaacgttttgctggtattcattcagttcttgctcactgatccctttagccagacgcttaaccatcacttcattcgctaacgttaacagttcatcatgtcgttctggttgacaagtaaaagccagcaaatgactgatatctttggcctgaggatcaacgctgaggcgagaagaaacgctgtatgctccagatgcctgttcacgaatattaacacgtagatcttttgccagtgcgacgttaaaagcatcgagcgccatacgcgtcggcagattaacaggtgtccgggaatcataacgcttccactgactaacctgtgccacaggttcattttgttcttttacagtaacgcttgcgttgtccgtcgcgcgagttaatggtttacctgcggctaatgggctatcagagtgtttgatacttcctaagtaacgcgtaattaacgccacgagtttgtcttctgcgacattaccgacaatgacaaacgtgatatccgctggagaactaaacaattggcgatcggcagccagcgcatctgcggcagtaaactgtgcaatctgattttcttgcagtaatttcgtgcggtcatcagcatagcgcgtctcatacatctgctgggcgaatttctccgctggacgctggtcgagcgttttcaacgcctgaatttgagcattttgtaggcttgcccaaatattatcgttaatcgtgctgtgggtgattcgctggttaatcaactgaaaaccaggttcagggttattagtccgcgcgctaacggagagcaacgtattcatgccactgactttactgctcatggttacgctattttccgcactccagcgtttcaggctggaagaggagagttcgccaacgccgcttccgctaactgctttatttgccagcgcgataagacttttttgctgcgcagggaaacttaaatcgcctttattgcttacggcaataatttgtagcttttgctcttcacccgcggattttgccagaataaccctggcaccattggaaagtgttaaacttgtcagattctccgccagcgtttctttgctgctaatttccgcctgtgggtctgcgtctactgttaagcttaaatttctgcctgggaagacgtaagccgccagctttttgttggcgtactccttttccagcgccaggatagccgcaggagacaatgcttttttggcggcaacctcattgtttaccatttgctcccaaaatgcgtcctggttctttcttaactgctgccatttttccgccagactttgcacggtaatttgctgccacagacgtttgctaagttgatatgtctcttccgggctcaagaacggcgtattatttaaactgctggatgccaggcgactggtcagcatacgtaaatcacgttcagcttgctgatcaaccgcatttttcagccaggtgaggcgggtagatttgacatcatcgagttcttcagcagaaaaaccatgctgatcaatggttgccaactctgccattaatgcattcgcagcatcctgcatattatcgtctcgtgcatttacacggaaaaacaggctctgataatcgggtgcaattttaacgctgcgcgcagtgccgccagaaatagtcttcaactcgccgctctgtatgcgttcctgcagacgttgattgaacagctgaactaacatgctccattcagcttgttcgataaagctttgctcatcgttcacttgtaccattggcaggcgataatagagtgcgatgccgttcacccggttttctttatcattaatgatattaaagcgcaggtggttttcggcttttgtcggccagacgcgattttcagctgctttgttagccggaagcttacttaaattatcctttatcagcgccagcgcttctttactgtcgatatcgccgaccacgataaaggtcatattatttggttgataccagcgttgataaaattggcgcaattgtgccggtgtgaccgtggcgacagtatccatcaggccgataggttcacggtctaaattacgggtatttgccagcaggaaagggcggcgcgcctgagaggtgcgccatttcgcatcctgatgggcacgccattcctcagtaattacgccacgttcagcgtctacttcgagtttttcaaaggttgcggcattactccattcactgaagattgccatcacttgttgcagattttgtttctgcgtagtcggcaaactcacctgatacaccgtttcgtcatagctggtataggcattaacatcgcgaccaaaacgcaggcccatactctcaaatgtttcgatgactttattacccggccatgtttttgtgccgttaaacatcatatgttctacaaaatgagccacgccgagctcattgtcttcttcctgcaaactaccggtatgaatttgcagccataaatttacctgatcctttggatgagcatgcggataaatcatatatcgcaagccattgtccagttgcccggtaattaacttttcatcctgcggtaaggcggcggcaatcagccgcccggggagcaacagagttgccactaacgtcagtaagaaacagaggtttctcataattatctccatgcgaaaaccgggcgaatttacccggttaagtaaaatccgaactattaaaatttcatgctgacatcaagccagaaagtacggccactggcgtaggtcgccacaccggtgttcgttgtatcaacagcggttttgctatccagtacattgagaatatcggcactgatcgtcaggttttgttgttgcagaaattgtggcgtccaggacaagcgggtgtcccaggtcaggctgctatccagtttttcgtcaacatactgcttgtaatcactatattcgctgatgtattgcgcatttgtcttaccaaggataatgcgagctttacgcgcttcttgccaggccagcgtattcgcccacactaacccgctcggttgatgcgtgaaatccatgtttaaggagatctttaatgggttattaaaatctgccactggaacgctatcgtaagagaccagattaccgttataaaccacctggttatcaccggtattgctctcctcataaccattgtttaagctcaagttgcccttgctcttgatatagctaaagacaatttgtgggttaatatctacctggcggatatgcaggggttcggccagttcaaaactgaggctgaagctatgcgttttggttttgccatcgttgttatattcagtaatggtggttttagtcgcgctgtcggtacgactgcttttgctgatttgatcatgcgcttcacggtaaacatagtttgcacgcgcaataacgttcttaccgattttctgctgcaatcccattgccagttcatcgttataaggcgttttcaaatcctgataacgcgtcagagttttattaccacttacgctttccgtccagctattgcggatatcacgtaatcccatatcaagaatattcccgccatagtaacggttataacctgctgtaatcatactggtttgattagcaaaaatatcccattccgtcataaagcgcggggagatattgtggttactcagatagttgtcatagtcataccgcacgccgggcattaaactcacattacgccagctaatgcgatccgccatatacagcgtgtagttgtcaattcccaggcggcctttacctttatggtaaatggtatggttagttttctttccggcagcattaatcacataggattcagactggttatggcgttcagtccacgcatcggaatagatgtattccgcgccgaagtagggttgatggctaacattacccacggcgaatttttgccagtccaggcgtgttttgaaggtgtaattatctacagcctgggaaatgtgtcctaatccgccacgggtgcaacgccctgtaatatcaccatatgtacaactaagttcggtgtaccagatgtcatgatcgtgacgggtataatcactaatatgatcccaaccaacggtggtacgcagtttggcccatgcgagctgcgtatccatatcccatgccagaccataggatttattacccatttcgcgatcagactgcgggaaggtgctggtattataatcacggctggagccggtatattttaaggttaaatcgtgggtaaagcggtcgctggcaaaccaggtaaatttgcttaatgcagtatcgataacgtttttatactgtgcccgaccggcgacaatgccgtcattgctaacataatccgcgcgggtgatatcagactggcggcggcttaaaccggcggtaacgccgaagttatcagcgagttcctgattaaagctcaaggtataaaagttctttttaaaatctggggagtaataagtacttccactagagccttgattaaatgcgctcttgttattctcatcgatatggcttgttaaccagtcgctacgcgtagtgcgataacccaatttcaccttgctatcatcagcgttgaagcgtttgatctttgcatcaattaccccgccattgaagcgaccaaattcaaccggcacaaaactgtcataaagcgtcacattgtccagtaagctgacatcaagataatacccctgactcatcccgctaatattggttgcactactggcatcggactcattcgctgggttcaggttattagttgcactaataccgtcaatcaaataggcattctggtaggggctcgcaccgtgaatagagattttctcagggcgaatatctccctggttcaagctggtactttgcgtactatccatgcgtaccgcagggttggttctcagcagatcgctgatattgccattcccggtcggtaaacgctcgatgctttcactggtgtaatgcgtgttgccgtttacgggtacagggacaggagcatagaccgtcatctcttcaaaaaaatgcatgtacatgtttttgtcatcgacggcctgcgccacatcagcgccacataaaatgacgccaggaataagaactcgcttcatttatttatatctccgtacagcagggcttttattgtttttataaaaccgcgctaatgtcacaaatatcatcggccaggttccagacaccgggttgatgtgtaaccataatgacgccgcttgtgggtagtttttcacgcactaaacgcagtaagcggatagcctcttgttcctcaagatgagaggtagtttcgtcaagaaatatccatttcggacgtcgtaaaattaatcgtgccagggcgatacgttgtttttcgccgctggaaagaatatctccccagcgatcgtggtcatgaatacgcgcagccaatttcccaagaccaacctgatgcagtacttcgctcaagcttttatcgtctacgggcaggggaagtgctttacaaataatctctttcagtaagccggttttgattaacggtgtttgactcacataccaactgtcagcaggagaagaaatatcacctttaaaccacggccagcagtgggataatgttttaagcagtgtggtttttcccgcgccagagtagcctttcagtaatagccatttgcctgggctaacatgaaagttcaggttctctaatatgatcttattatcaggcgtacgaatactcgcatcagccacttgtaccgcatgttggcaatttttaggcttattcgtagggcgctgttcagtgagttgatggaactcatacaagcgatcgataaccgcagccagttcagcaagttcgtcatatttataaataaaccagcttaaattgttgcttaccagcataaatgcctggcggcttttcatcagtccgcccagattgatctgcccgctaataaactgcggcaataacagaaagtagggaagaacgctaaggctgcggctataaatattctgccagtaatcaagccaccgctgacgattcattaaacgatgccagttctctttaatggtatgaaaattgtcgctcaactcctggcgttgtagagactcagcattgcttagcgcaatcagttctgcctgcttattatgctgcacaagatttgttcgaaatgtcgcttcgctacgttgtttttccacattaagcggacgaatacgtttacccaccttatgggtaaataaagttccaccgatcacaatgagcacgacggtatagaccatatacccctggatattccattctgttccaccaacagtgaaactgagcgtacccgcgctttcccaaagaataacggtaaaggtgatcagcatgctaagactctggatgaagccaaaactaagactgagcgttttgctgatcagtaagagaatgtcttcagcgatacgttggtcagggttatctgtatttttatgctcgccgtagatctgcgtgaagtagtagtttttatctgcaaaccaccgattaaggtagtaatctgttaaccattcgcgccagcgaatagtcagtagtttaattaaccatgttttgtttacggatattaatacaaagatccccagcagggcagggaaccaaaggacaagctgccaaagcttatcggtttctttctggcttagcgcattgaaaaaatcattattccagtcgtttaaccagacctgaattttaaccacgccaaggatcatggcgaggataataatgattaacaacacactagttttattattcttacgcagccaaaagggcttcaacagacagagatactttgctatcaacatacgaagcgtaatgggaatggttatcattagcgaaaattgattgtgccatccaatgattatctatggcaatgatttactgatgaaatttatttaagtatcatttaacaatatgaaatataaaggaatatttcattttcagtggttatggttatgctattgataatcaaggatattgctaatgccctgatgcataccacgtaagccaggattttcgcaagggaagatgatgatgacgaaacacccgacaggaatttatgtcgggtgccttgttaaggtcataagaaggaggctaagaatggagttaaaagagagcgttattaattattctccatttgttttgcaacatccataatgtggtaaagcggtactctgttcttagctaactctaccatggcgttcatataaggtaccatggtactaaaaaggattttataaccttcgcaaaaataagaaacagtctcattgtttactttagtaatacgatgcttaggacaaccgccattgcagataggtttatatgcacattgctgacatttcgctggaatccgttttttttgcgctgtcagttgtacactgttcatcgttttgagttcagatttattaatgtttccaattttgtactgtggatagacaaaatggtcgcattcgtaaatgtctccattactttcaacaaccagattatccttgcaggactcctggaaaatacaactggtatgcccattccccaaaaaacggctgacaaagctttcaaactgacggatgaaaatttcacccacatcgtttttaacccattgcataaaaatggtactcataaacttgccataagccgtgggaggcacagaaaaatcaatgatacggaatgtgttctcactatgaccactgaaatcaatattcggcgtcccggtttctagcaattcgataaattgcatatgtttactgccgatagattttaaaaaatgataaacctcaagagggtaatggacattaacgttattaatgacggttaacgtattaaactctacttgataacttttcagacgctcgatggctgctatcacttttgcaaaagtaccgttaccactattactgcgtctgtaacggtcatgtaactcctgggggccatcgatgctgataccaaccagaaattcatgttctttgagaaaggcacaccattcattattcaataaaatgccattcgtttgtaatgcattaaaaatacgtttttggcctgcatagcgttgttgatagtgaataactttacggaaaaaatccaggccagccagagtgggttcaccgccttgccaggtaaaatagacctgattgccagacgctgcgatatattgtttgatgaactctttcagagtgctgtcatccatccatttttcatgagtaaactggctctctttttcaaggtaaaaacagtaatcacatttgagattacattgaaaactggagggcttggctgtaacgtgcatcgctatctcgctcaataaggcggcggaaaaatccgccgcatgaaggtttagttatttcgcttcgcttagtgctttcttgatattgttaaacttctcctgatttacctcgctaagcggtggctggctgctgtcgataaactctcttaccacgccttgcatctctttaacgacctgcggattggcggcggcaaggttatctttttgctgtagatccgtcagtttgtagagacctaactgattgttttctactgtatagacaaggctataatcgttatttctcaccgtataagagaattggcttaagtcctcagtgttggggttatgcgggtaatcgtcactctgatggcgaacaaatttgtggtaattatcccagaatggaatattttcctcgtcaaaccagtgagaataagaggttatccaggtcagatttttatgtggctcgccttgtttcttatcttgcaaccagggcagcaaggaaacgccatccagcttaaggtcttttggaatgctgatatcggctgcatcaagagctgtcgggtagaaatccattgcggaaatcagcttgtcataattaccgggttgaagttttcctttccaccacataaacattggggtgtgagtaccgccaggataggtctgactcttatagcctttttgcgccccgttcagcggcagaggaccatcgataaccgcaccattatcggaggtaaagagaataattgtattgtcatactgtccgtttttcttcagttgttcgagaatgcgttttacaccctgatcaacagaataaacggaagcgtagtagttatctgctgtttgactaccggtattaaattgcttctgatattgatccggtgcaggattatcatttggcaggtgcggagcattataagccaggtaaagcataaaaggctggtcaagtgttttggcacgatcaacaacgccaattgcctcatcggttaactgatcgctgatataaccttttgcggggacacgttcacgatttttgaacagactaggggagttgtaatatgccgttcctgcagcgtggaatcccataaagtaatcaaagccacggttttgaggttgccattcttccgcagaaaatgtggtgaagttgtcatgatagtcacgcgtttgtttatcttccggtaccggcacattactgattttactcaagtgccatttacctactgctgcagtgtaataaccatgattctggaataattcaggcaagaaagtttctgttagcggaataccatcctgagcatcggtattggaatagacaccaaagcgggcgggagctcgaccggtcattattgcggcgcgggaggggccggaaacaccgtgtgccacatagccgttagtaaaacgtacgccttcatccattaaactaaggagcgtcggcgtacttttttgtgcagcttcaatggctttatctatccctattttgtaggtatcgacaacttcacgattttccattgtttttgggtcaaaagatcccttatcaaaaggaagttgtccataaccaagatcatccatggtcagtacgataatatttggctttcctttggtactgtattctgtcggcgtaaagtcactgaaagcaacgtttgttttggttgctttcagctttacatcatctgccgcatgagcagcaaatgcagccataccagatgccagtatcaaagatatgctggtacttacgacacttttctttaatgcagacttcataaatgttcctcttcttattgtacttaattccaaagtaattttacgaagagaaataagtggatgtaagtgaagttagtcacataaagagatagcagatttagctaaaaaaagggaaaaaacagtccataaagcgttgacattactttctgttctattaagtaatttctcgccgataaacaactaatttattgatatttaataaattattgcattttactgacaaaatgcagaattgagatcataaataatcatgcaacaggttatgcaagtgcataaatatgtgatggatgtcacttatttatttcaataaatatatcgcctaaaaacaacgcggggcagggaatggctgccccatttaattcttacgcagcgtgtgtggttgactactcgttagcaaataatcaaatagctaaagcattcatcgtgttgcccgtattcatacccgtgtgactttgacaacggtactccttagaaactctcttcggactgttgccgaaatgtttgcggaacgcataaataaaataagatgtactggcataaccacattgttcggcaattttattgacactaccttctacgcgtatcaaattttttgcgtgctgcattcttgcatctaaaagaatctgactgaatgtcgtttgctcttgcttaagttttttcttcaacaggctttcactgatgtacaggcagtcacaaatatctttcagcttccatgggtgcgccggcttcatgttgacaatatttctcactttcccagaaacggatagcacaccgttagttaatagtgtaatgaaacctttgcatgcggcaaaaatagacaggcaagaaaaaagcaaaagttcactaaaattatgatgattgcgttcttcgctgttgagataagcaatcatttcattaagcaatccagtcggtacattactagcacgtaaaaacttcgcaggaacaggcaccgtcactgtctggatgttagtgcattgtagatattttttaatggtattttcagtaaatccgatctctttaaaatgccgctcataaggttcaaaatgcgtacgaacagcgttatctaccatcaggatctcgccgtcagagaaggcgtaatctttatctaaaatgttagcgttgaaggcatgatgaataaatataacagaacaaacgaggctcattttatctccttaaaacaataaagtttttatcgatacttttttaacatttcatatttataatttgctgtttgttttcagccttgcaaactattgataatgaaatgtgtaagatctcttgcaatgcgacccatttctgaaatactcagctgatcaattgccgaaaaaatggctatcaacgtaagtgtcagtaataagacaaccacaattgcagacatgatttctttatagttgtctctttgcgtgattttgtttttcactgtggtcgcatgcatttcaaatatgtttatttagcggataacgttaaaaatcgttaatcagtatgcttaatataacaggctggagaaaagaggaaataggactggtgcttcagtactgagcggagtttcttacagctgtaggcagaagtttatatcttatagtatgtagtttaatttaatccatgtgagcaaattgcgaaataatagtcaatgaggaattcttctgctgtgcggatgacagcagaagaaatgagaagaggcattaattacttggttctaattcaaccggaatacttttatagccaggaatgccacttaatggatcgtggttatcaagtgttagcatgtgattgctttctggaaaataggtcaccagactgcggtcagccatagagtaaatgaccacttttaatctatccatgcggcgactgctgcgcttaccgtctggcgtaagcgcaataagattaactctttcgccgttttttacacggcaaattttagcttgtttagcactcataaagaccacatctcgttgaccgaatacccctcgatagcgatcatccataccataaatcgtcgtgttgtactgatcgtggctgcgtactgtcgccatgaccagcttactgttaaacgcactagagggatcttctaacagccctttgctggtaatgaaattagccttaccactcggcgtcatccagcgcctttcagcagctgcatttatcaggtgaaaaccaccgggatgacggatgcgctggttatagtcggcgaactctggcagcacagcttcaatgtcattgcgaatgcgatcataatcttccaccagatactcccaggctaccacgctctggggtagtgctgcctgcgcgattcccgcgaccactgcacactcacttttcagcattacaccggcgggttttaacacgccacggctggcatgaatcatgctcatactatcctcaacggttaccgcctgcgcaccgtttttttgcatgtcaatctcgctacgtcccaggaccggcagaatatagctatgccgtgcggtcaacagatgagagcggttaagcttagtggctacgtgtaccgccaaatctaattgcgttaacggtacagcgctcgcttcccgatctggcattgccagcgcaaaattgccccccatgcagatcaatgctcgagcctgccccgtacatattgcttgcatgctggtaattgcagcatgtccaggtgcatgaggtggggtgaagccatagcgctcacccagacgagccagaaactctgcagacggtttctcggtgataccgacggttcggtcgccctgtacattagagtgtccacgtagtgggcagatacccgcaccaggcttgccaatgttacctttcatcaacagcagattgaccagttgctgtacgttctgggtaccatgttcgtgctgagtgatccccattccgtaacagataatggtgcgttcggcagcggcatatgcgtcagccagttcggcgatttgtgtctgacttagtccagaaatacgttcgatatctttccactcggaattgagaacgtcacggcgtagctcgtcaaagccgacggtatgcgtttgaataaactcgtcatcaagcaaactaggccgacctgcggcgcttgcagcatcatcgcgctcaattaacaggcgcatcatccccttgagcaacgccatatcgccaccaatgcgcacgttatagtaggcactggccaactgagtctcagagttcgtcagcatttcaaacgggttttgcggtgcggtaaatcgctccaggccacgttcctgtagaggattgatggcgatcattttcgctccccgtttcactaaagcgcgcaagctagtcagcatgcgagggtggtttgtaccagggttatgcccaatgcaaatgactaaatcgcacttctcaaagtcttccagcaacacggtccctttacctacaccgatactcgctgccaaacccacgcttgtcggttcatggcacatgttggagcagtcgggaaagttattgctcccgtattcacgggcaaaaagctgataaagaaaggcagcttcattggaagtgcggccgctagtatagaattcagcctgattgggatcactatagctttgaaggcgtgcgccaatttcgtcgaaagcttgttgccagcttaatggcttgtaacagtcgctgacggcatcatatttcaaaggctgagtgagtcgccccgcagcctcaagctcgtggtctccccaggtaagtaaactttgaaccgtattctcagcaaagaaagaggcgtttacctgcttatccgtgacttcccaggcgattgcttttgcgccgttttcacaaatgtcgaaactcgcactgtgcttaggatctggccatgcacaacccggacagtcaaagccctctggcttattcatgtcaaacatggcaataacatcctggcgtatatccatctgcttacgtactgcattcgctacggatttaacagcaccccaaccacctgcagcaccctggtaggattcaatttttttcttcatctacttatcctgtgtggaaatgaattattaggatttgtaatagcgatgatgcacagtacatacaaagggattatcgccaacatggatatataagagtaggggactactctctttctatttttaatctattatcgttaaacaatagattaaatacgataagttaagcatcatctctcatagtgtttaaattaacatatttttcaatataaaaaataagactctggcttcaattgtgcgcggattttcttacaggtgtaggctaatagccttcacaaaataattatccgcgcaattttcgtgaatggagcgcatagactaaggtcaaaatcacaattattcatagataaaagtgacaccaatgacactctggacggttccggcactaaccttgtttcctgtttgtccataggttgcgcttaaacccagaggtactttgcttttatttactgtccccagggagacattttctcccgtagccagtatttttccattacgcattagagtgacacccactccgcttgcttttgttgcatcaggtgctgtgttagcaaacacttgtcggctactgtcagtggtggcaccgctaagataaaaactgagcttttgttcgctactgcaatatacgccaaggggtatttctgcgcttccaggaaagtccgggagatccacggtgacatttcgactatcaacggtgcagccgcctgttggcataacaacattgttattactaataatattccacgtaaaattacgcggatttccgcttcctaatgttgcaattttatacatatgaatacgggcaatgacttcccccgcttttatgacaactccaccggccgccccaactggggtaatatagagttttaacggtaatggcatcggtgtcttatcaccaatatccaatacgttggtatttgtcgtcaacgggaaggggtaggtcacattattccagtacaggcttcctttataactctgtagggagcctgcgaaagcactgccttgtaccaggtttatatgatcagtgtcgtaccagccgccgtaatcattccagcaacttatatgctgagacaagtctacaaccagattctggcccggctgtattacagggtcgagattaacataaacagaggttgtacctgctccaatactactcccgccatcgacattacaactgaaggcaaaaactttgcctgccattaatagaagataaataccgaacaggacctttatactgattgttttacccatgatatatcctaaggttaaaaattgatttaaaaagaaggctaagaaaatcgaatcgacgttattgccaggtgtagatcacattgattagcgcctcgatcgttccctggcttgcgtttccattcaccgtgatagctcttgccttaagtggaaactgtgcattacgagtgatctcatcaacaataaccgttttgctatcgccattttttaacgcagcatcctggtcatccctcagctctatctgaatattttcggcagtaccttcatttttgtaataacccgtattgtcagtactacctgtcacgattgccgtcactgcacttgtttcaaccggacaatcggttaaactcaaagtaatattgtgccagccagatgcagaaccaggttgttgcagattgcgcgtataaagatccccgagattaacgttagcttctttggtttgaatagtgcagggtttagcgactacccgaccattaacagtgatagtgacatcggcggcctggagagttgctgtgaataacgcgcaaaacgtagctaacaggaacctcttgtgaagtcttttcatatctgactctgattattgaaattcaagggtaaaggttgcgctagccctcaccagtcccggattgacggacttctgagtactcttcagacgagcggagtaaggcaaaatattgttctgttctggtaccagtgggatccactgcatcccggcatgaagatcattcagtttcaccggacgcatatttgcgtccaatatttctatacccaaaccggaggccgtattgcttccttcatccagtttcaacaaagtattattttctgcatcctcaataccgttaaatgcaacccgaacccccgttgtccctttgctgcattcacttaacgtaatctgaaaagggacggctggacttgtgctaccggtcgttggaaattgtctggcactgtttttttggagatctacggtaaaattaaggctatcgctactgactgtgcagccataatcgaggacgcgcccgctaattttaataacgctatctgcggataaagcagaataggtggttaaccccagacataaaccgaggaaaataatgttattgtatttcataatctattgttccttagcgacagattgctgtctgctggttcagtaaggtaccaggagaaacttcaggaagcttgtactcgacaatacagttactgtttttatctttgccccaactaacctgtaattgcccactctgtggaagtccagtcagataaacctgaccattttccgcgacaatgctgccatttttattctctccgtgtgtgacaattgcaccgaatggaacgctcttattaccgtacttcaacgtcattaatactttcccgccgatttgtgcattaaatgttgctctggcaatagcaccgtgagttgggatgacagtgaccacggtttcatccagttcaacattatctgcaagggaattcgcgttaagagcaacacggttttctctatattctgtcgcaaatggtaatatggcatagccacgccagtcggtatgaattccggtctggttctctattttgacattatcagcaccaggagccttaaccagaaccattgtgtcgcccagcggctgtccaaaggtgatgccatcagcatgagcaataatcccaccactcattccgtaataaatctggctgctgtcaccactccgactgtaaccgacattagtattaccataagctccacgataattaagagaactgtaaccactagtgccagagcttgtattacctccgtgggtgttaccgacctgaacgctataattcaggttattatccggcagcagagtgccataaaccccgcttagattggtcatgccgcctttcaaatcgttactcatactgtaactggcgttactattacgaaatgcgctctgactgtctgtacgcatccaatgactgaagggaacattaagcgtaaaagcgagtaaatgatcccgatcgttttgccatatattattggaatagctgtaattcaggctagtcgtaatatcaccaaacggcacatttaatccaaaacttatttgctggtcgctgcgactcgtgttccagtaactttggcgactggcactgaaaaatgtcgtaccgtaatttccaagctgctgagagatgcttatttgttcctgaccacgcttactgtagaacagattaaaataatcaataaattgtgtctgctcattggtgtctccggtaggaggcttgacggtgtaaccactcattcgactgtaggcactgtcggataagttataaaaaccttgcgtagaatagcgatatcctgcgacctggatattggttccacaacaagtttattgctgcacttgttgaagagagtatttgcaaaaacattttatgtcgctaaataacatgacgatttcattatgcatgttatttataaaccgtgactaaacagaatattattgcgaacaagggaagtgtcaggaaaggtcaagagctaccaatggttaatatggctataaatcattagctatggttaatgtttgcttgctgaaactaacaccgaattgctctaaacagataagtgcagggtttattaaagctgtccgacagactttcttaacctggtaatatctctcttgggtgactctccaaacatccgcgaatattcccgacactaatgggatagctttcgtaaccgacagcataggctgctgtggtgacatcgtaatgttcattcagcatctgtcgcctgacttcattgagacgtagccatttctgataccggagtggactcattcccgcttgatccgtccttaaataagtaacagcaccctctggtgttttcgtatgcagtgtctatgcgacagacactgcgctcttagcatggggcagggaataaccaggctatttctccatgcacaggccaattatgaaagaggagaggcttaagttcttgaaccctgaacgaataacgactaccagaaaagcacttcgcatcactcagacatgatttaacataatatacattatgcgcaccaatataaaccaaggaagaatccagtcgttggcggtcatgattgtcatgctcattaacaatgaccaaaccccatatctcacttactaccgtattctcggcttaaccgtccatgcaacctcaacacattgctttcaactgccgtcaccacgttctccggaaaatctgtcggtaaactagtcttcacgttatccagtgctgctggaatcattctggcaaagtcactcaggatttcatgcatctgcacttccgggaatctcagcacctttgctgtcgccaaaaaatgtcgcggataaattttatcgattgccgtttttttgcctttggatgcgttaagccccattgccagtttgagatcgctgatgtgtattcccgtaccgccaaggaccggaaatgcactaatgatgtcgtaaaatggcgtgagtcgataactgccgccagcctgaataaatacggagaagttttttgcatgaccgtccgttgcgccaatcaaccactggaagacctggaatttcataaaatcatagcgatctttcagcgcctcgctggaccccatcaaaaaagccatgatccgcgcgatgcctgggcctccatcactttcatatttcacgctactaggtaaaccgaatgtctgacacatatcctcctgtggcaagcgaagtaaaaccgttcgctcagcattccaacgcctgtcaaagcgttcgaccgctaacgcgcgcacatttcccgctttaatgatttctgcgtccggaacattcaacccaagttctttcgccagcagcagacagtaatactcattatcaacgctttggctgagatcgagcgtcgcattgggctgcctgatttcgccaatcggtaatttaatgatgtgcgtcgtcggcgttattcctttcggaatgcaccagtcattgcctattctgagcagtgctgtcttctcctgtgcgccagcaacgctgatgcgaaagtcattttcttctctaatcatgcctagcgggatatctgctttataagccgttaatacttcttcaagtctggcttcagtaagcttttcccatgccattatcggatgcgttacggtttcgtcttcgggtattaacgtcacggcaccaacgctgtctcgccctatttcactcaataaatcaaacggttgtctggatttggcatgataacgtttaacgatccggtcacgtacaatcgggctatcgggtaacaggttatcgaagaagttaaatacggcatcagaggtgatattccccctctgcaatggcaggctaagactcaacggtctggcataacggcttgctaaccactccggtgcatacttaaaggtgtgcgcgccgttggctaacttcgttaactcgcctacccgctggttgttcatccaagtgacaagtttaggcattaccactccagattttgctgttctgtactttctgggctggcatttttcgcgtcgcatagcgtcatactgagttcaaggctctgtaaaatcttaaaaaatgtcgtgagcgtggtattgtcagggttgttttcgaaattggaaatcgtcgcctgcttaataccaatttttttcgccagctcgctctgcgtccagccattttgctggcgaaccagtttcattgcattcgccaattgcgttgggctatagatcttctgaaagctcatcatgtcatacgtccacagcaagtttatccgcttaaggggatattataagttttatcctttagtgaggataagtcaatctggaaacacatcttatccgctctacgggataaacgctgcgatatccgcgatcgcggataaaaaggaggatttaaataaggcgttgatgcgccgtttgaagtcggcaatattaagccgcatgccatctcgacatgcggcttatacggtttaccagctatatttcactcccagcatgccctgagtatcgctatagcctttatcacctagttgcacaccgacattcccccacaggctaaggttgttatttactttcgcctcaaccccggtacgtacttcaccgagattacgcgcaccttcacggcctacggtttgaccattcatcttcacggcgtagactttgctattgttgatccagttcgcttcaatgtaaggctggaactcacgctgtttaccatcgtcacgctggtgatggctgttcaggtaggttttcaccccaagtcgcgtttgcacatttccgtcgccttccgtttcaatgcgcgttccgtctttccgggtatggtcggaatctttcacacccatccaggtgatttgcgcctgtggctggacgtaccaggtattcagcgtcccttcgctgccgctaaatgttcccgcttcaaaggtatacccaccctcaacagaggccgtcacaccgcgagaatcatagtcgtcagcagaacggttatcggaactgacgctgttatcaaaccagttatacagcgcccagctgtcaacataagcgccggtcttattcgcatcgttctgataccaggtcgcgtacagcccagcgctgtaaccgctgatgcgcccatcgcttttataacccacacgattactctgagtattactgtgctgattggcgtagcctgccatcacgccaagatgccagcgatcctgcgcgttgctactccactgcgccaaatcgccgcctagctgcaatacatagcggttagcctgagtatttagctgaccgtcaccggccctactacgttcgtgccctccgacatgacgcatccacatactgcttgcgctcccctgagaatgcagactatctgtatactgcggctcacccagacggtcgtgtaaacgatggctaaacaggctgttggctgcggcaatgttgctgatatagcttccggcctccgggcgataaacacttgggccttccggatccacaacagggggattattgatgggatcgggtgtatccgctggcgttacgccgtcccatttactggtcagataccagtttttctcgtcattccccttccctttagccagcgtgtagacgtaagccccagcttcgacagttccggtggtcagcgcgaagttacctgcagaattaccgccaacctcaatgagttcaataccgttgaccgtttgtgcaccgacgccgccaatgttatcaacccgaacgcgagtgttcccttgggtatcgcctttcacgttcatcttatcggtggggctattatcgccgcccagcgtcgcgttgaacgtcatcaggccattgtttccggtatagttgccgttaacggtcagtacattccccggtttccccccttcgctattcatttgaaccgtgccgccattctccaggttgccgccgatagtggttttagcgacacgcagtgccccccccaggcataacgttcatatcacctgcagtggtgacatttccgctcatcacaccgctgttatggatattaatgtgttgacttgccatattaatggcagagtcggaaccgaaagcaatttccccccccacgatatccgtcgtaccctgatatgccgcggaatcgttgttaagagtcaggatcccggtacccagttttgtcacatcaccgctaccgctgatactgtgcgtcatcgcccagctacgctcagtggagatggtgagcaggccattattgataacggaagcatcacccaggtttttctgctcgttgacgctgagcgcgctgcctgtatcaatgttgaattgccccacaaagcggctattatcgccatccaactctacatctgtcctggcggttgcgctcacgatacccttcccgcttatgctattacgcagttcgccagtcacgttttttagcgttaacagaccgtcattggcaatatttcctctgcctaacccctgagtattatcgaggctgacttccgcatttgggctaatgctggttaacgcattgtagcgtgcattaagcccctcgatagccagcgttccccctgtaacattcaggtttccgccacctgtcagttcaccctgactgatcccacctttatttaccgtcagcgccccctctttgaacaaaacagtgctacccatctgcccggtgaatgtctctaccgtctgcgtgcttccattaagatcgacgatggccgcgttgctgatgttcagttcccgggtgttgccaagtgcaccatccgcatcggtacgtaatgtccccatctgaacgtaggttgccccctgatagtcgttctgaccgttggaaaggctaacctgtcgcaccgtattgattgccagatccccttcaccaccgatttttgcgctcatatcggccgttgcgccataggctccgccatgttcggctaacgtcagcttttgcccaccatggatgttcagcgctttcagcccatagttaacgtacaaaccattacctggtgcggtcgtgaggcggaatccataatcaccctcggcgaccaccgttccgttttgcgcaatgtgtaacgttttgtccgcttccacctcgtcgccctgtaaatcacgtaacgttaaactgccaccgctcccaataaccgtttgcgccttcaccagttgaacgccgacatggctatcgtcgtgttccagcaaattgagcgtcgtcagagggttattcgccatgggatcattccacggtttaggcacgtcgataagcacgtcgcccgtcccgtttacctgatagttacggcctttccaggtgtagtcacccgcgccgacaaccagcgtatcgacgctgatatatccctccgcgagcgtcgcagcaggaatatccgtatcgaaaatgatggtacctccattcatggccagtccaccaatggattgctctccaacttttacgcttgtggtattttcactgtcagactgcaacatcgcgtgagtaagcgcagcggtgttgtcgcgttccagagtgaaggtactgtctttcagttgggcaacaccggcgaattcagtccctgttgcatgggtaaagccaaacatcttgtcggaggaactcagctgcactcgcatcaagccatcgcctttgagcgcattggtcagcgtgtaatctcctgcactgttcgtacttgcgagaatgtcgagcgtaccggggtttgcaatggttacttcactgctccccatgcccgttaccccatctgccgtatgagacgcaatggtcaggaggccgtcattgaccagcgttttaccgctataagtattccctgcattgaacaccgtatggcctgcatcatggatcacttttccgtctttatcgtcacctgtaatcagcatatcgacctggtagccggcatcactgttattggtatgattaaagacaaaaacgccttcgccaagaccaaactccactttcgtcgcattggtgataaatccggcatctgccgccgcctcaccgtgagcagcaccaatgtttagcgttcctacagcaggctcaaaaacacctaagtaaacttctccaccttcgacattcagcgtaccgttattcgtcagggttaacgtacccgtaccagatgtccctacgtacatattgaatgtttcaagaagagagttctgcccatccaccctcacgtcgcccttacttttgtcattgagagctatctgtgtatcacgcgctttaactatacctccggtggtaatattcagttcacccgtgcctaatacaccgacctgtagcaattgtgcgttagtagaacttgtctttaaattccagagactgtccgtactaatattaactatccccttaccggaggcatttcctccgataaatccatagcccgtactattaagggtggcaccattactgacatttacgataccgctaccaaaattaccgacattgatacccacagtatcgaagctacttgtcgcatccatcaggttcagtgtgccgataccgcttgctttatcgcccaaaaaagtaatattttggcttacgaacttaccgccatcgctaatattgaggtttccgacgcccgcaacaccaatggtggtatagacattcttattgacctcccacattccccccgtggtgatgctgacattcccgacgccggtttctccataaccgagactacttcctccgttgctgacaacaagcccctgattactgatattcatttcgccgtggccgtcataaccaagattagttccgagattagtgataacggagttcttatccttaacagtaatgttgcctgtgcctgtttctttcatccccgcagtgataattccgctatctactttgccttcactgctgacattaagttcaccgtcgccagcatcaccgatatagatatagcggaaagcttcgcccgttccgaggaaattccaatgccctttatcggtcacgttgacgacaccgtgggaaccgtcctgaacgcccaccaaactatattctttgttattaatcagtccattattggaaatattgactgtgccattaccgaaatatccattatagagtctgcgtaccgtgatgacagagtcttgatcctgcacattcagggttccgataccggtggcattgccaccgataatcgtattttcagccgtaaccaaccccccctcgcgaatagtcgcctccccagttccttgattaccaatttgaaattcaatactggaatcattattttttattagccactcgccacccttttcaacgacaacctggccattactgcccgcctgatagcctaaaatggcgacgatactactcgtgacgtaacccttatccgtaatatttaaactacctgtgccatagctacctatttcgaataattcggtcgtcagaacagagtcctctccctcaacattgaccgtcccgacgcctcctgtgctagaacctaatcttaaatagcctccatcgacgtgacccttctgtttaatattcagcgtccccgttccggattgacccacatttaaaggccttgcattatttccgctatcatacaatcgccaggtgccacccaaaacattaacggtgccctcactgtcctcattagcgccaatgacgctggtagtaatagtggttaaggaggcattaccgccagccaaaatattaagcactccagtgccataccagccaaccaggtaggcatcataagcaacatcagtatcaatattggtaatctgatcattatcaacttccagacttgcaccagacgcactaccgcttagtgccagcaaaacacccagcgtcaatctactgaatttcgttgtcagtccagaggatttacgcaaattaaccgtgcttgttttacctgccctgcgagttaattcgctgcaggcctgaaatacctgtagagtgcaattccatatcacgcgatagattctattcatataaacgctccatatacaaacaatacagccacgaaagagatgagtcgtcagacattaaaaatgaaacttattaaattgtcagaggtctgtattgagtgttagttggaggtgggaaggtgtcaatttggctaatttgctaatgctttcgaattgatagattaaaaattgcatagttcttattttatttaaatatgaactatgagttattgttgcttaataagaaaactgtttctttcaataggaaaattatcatcatcatatttaacaaagaatagcactaattgctaaaaatcgaagtttattaaaccccttttgcatccattagtgtctttaggaatattcgctataaaataagggttgtgcttaatgctttaagaaaaatagcaattttcccttgaatatcgtactggtgatggaacgatgaatctgcaagctggcttttaacaagccagctctaaaagaagggaaataagaataactatactcaaaaactaacagccacggtcatcatgatgtggctgtcaatgaaattataacccaggcgctttccataagctcgtcgtcagtccatgatcaaccagccccagctgatcctgataaactgcctgccacttatcgcgactatcctgataaagttcatgcttttccgggtctggtgtgtgcgtccgttcccagcgaaccaggcgttctccggtttctgccatactactaaaaattccggcaccgacgccagctgcaatggcacatcctaatgcagtggcttctttgaccaccggaatattgacgggtaatccgctgacatcagcgagaatttgactccataatttccctttactacctccgcctgcaaagactaagctactaggatgaatattgctgaaatcagcaatttgctgcaagttacacgcacttacaatcgccgcattttcttccagcgcacggaacaatgtcgctttgttacatttatccgggtcaatggacaagttaataaaggaaggcgcagcgtgataccaggttttaaagcgcattctgtcggagaagatcggcattacgccccagctcccaggcggcacccgactggccatctcttccagcagcgtataggtgtcgatgcctaaacgttcggcaatcagtttttcttcggcacagaaagcatcgcggaaccagcgcatggtgagtccggtaaaaaagcttatagattcagcttgtaccatgccaggaataacatgaggattaacgcgcacgttcatttctgggtctgtcaccggcgcggctaaatttacaacttgctgccagaatgtgccgccaagaaccgcggtttgtgccggacgcacaacgcctaacccaaggcaaccaagctgcacgtcgcctcctccaacgaccaccggagtgcccgccttcagaccgcagagttccgccgcttgactacttaccacgcccagcaatgtgccggtttctttgacaggagaaagaatatcggcacgtaggccagccatatccagcaatgcaggtttccagtcacgggtggttagatcaagaagtcccgtggtgccagcgttagagggatccaccgccagttcgccgctgagcatataggccagccagtcgctgatcatggtgatggtacttgcctgacggtaaatatcggaacgatggtgcgccagccaaagtaatctggggatggcacttaaagccagtgtttgtccggtcgcgcgataaacttcgttttcaaaggtattgttgtgcagttctttaagttcgctaacttcgcgtgccgctctggcatccacattggcgcaggcccagatcggggctccttcattattatataaaacaatgccttcacgcatgctacatgcgctaacggcagcgatatactccggggctatgccggcgttgtgcagcgcctggcgcatacactcacacgccagttgccagtttttgttgagatcaaattccatagaaccaggaacgtccggtactgccagatgccgccactccgcctgtcccactgctatttgattgccttccaggtcgaatatcacagcccgaatacttccggtgcctgcatccagcgccatcaggtagtacttactttcactaagggtaaagagtcgagccattagattatcctcggcttatgcgttctgtctgttcctctatacgttctccatcattcccggtaataaggtcatgcaaatttaactacgtaaaatcgccgctgctgtgtcctgatcggtaaccagtgcgttgatataaccgcctttcattgcagcggcaattgcttcggctttattttctccccctgccacgccaacccggacgggtatggtcttcagcgcgcttaaaggtaagccaatcagttcgttatgtattttgatattcgtgacaacgtcaccttttgcatcaaaaaagtagcctaaaatgtcgccaaccgccccttttcggccaatcattaactgttcgccctggctgatataaccggagcgaatgattgtcgcatcgtcctgttgactcacagcaccaatgccgacaatcgccacatccgctgcttgcgcggctaacagaacatctttgacgcaattttcattttttagcgtacgggcaatgtcagcggaggatgcccgcaacggagccggaataatattcacactgcacgccgcgttaagctgcccgattcccgtcatataagaaccgacgccaccggagagcgtgaccaggcgaatttgctgactgctaataaaaccacttaagcgttgcagcgtattcatggttgcctcgccaaaaccaatcgccagcatctgttgtggttgaagtaaactcatcaacatatgcgccgcgcctatccccagtcgcccaccgacatcagcatccgcaagcccagggatcacccggacatgttgcaggctaaactgacgacgtaattgagtttcatattccagacagccttcaaagcgagaattaatctgtacgcgaataatgccggactgatgccctttctccagcaatcggctcactttcaaacgtgtcaggccgagacgatcgctgatctcgctctgggtcagcccgtcgtgatagtaaaaccacgcgatccgcgcgacctgttcttcttcacacattccctgttcactaattgcgctatcgttgattgtcataattcattcttcactttgaacatatttaaatctttaatgcaattgttcagttcttgctcatttatatctgtgatggcaaccacagtttgactctacgagcatgaacaaacgcaaccgtgaaaatcaaaatagcataaattgtgatctattcgtcggaaatatgtgcaatgtccacctaaggttatgaacaaattaaaagcagaaatacatttgttcaaaactcacctgcaaaactgaacgggggaaatatgcaaacgagtgatacccgcgcgttaccgctactttgcgcccgcagcgtttataaacagtatagtggggtcaatgtcctgaaaggcatcgattttacgttgcatcagggggaggtccacgccctgctcggcggcaatggtgccggtaaaagcacgttaatgaagattattgccggtattacccctgctgatagcggtacgctggagattgagggcaacaactacgtcagattaacgccagttcatgctcatcagctgggtatttatctcgttccccaggaaccgctgcttttcccaagcctgagcataaaagaaaacatcctgtttgggctggcaaaaaaacagctctccatgcagaaaatgaagaacttgctggcggcgctgggctgccagtttgatctgcatagtctggcaggaagcctggatgtcgccgatcgccaaatggtggaaatcctccgcgggctgatgcgcgacagccggattctgatcctcgatgaacctaccgccagccttacccctgcggaaaccgaacgcttgtttagtcgcttgcaagagctgcttgctactggcgtgggtattgtttttatcagccataagctgccggaaattcgccagattgccgatcgaattagcgtgatgcgcgacggaaccatcgccttaagcggcaaaaccagcgaactgtctaccgacgacattattcaggccatcaccccagcggtacgggaaaaaagcctctctgccagccaaaaattatggctggagttacctggtaaccgcccacaacatgccgccggaacgccggtgctgacactggaaaatctgaccggcgaaggtttcaggaatgtcagcctgacgctcaatgccggagaaattctgggcctggctgggctggtgggggccggacgcacagaactggccgagacgctctatggtctgcgtactttgcgtggcggacgcattatgctgaatggtaaagagatcaataaattatccactggagaacgtttactgcgcggtctggtttatctgccggaagatcgccagagttccggactgaatctcgatgctagcctggcctggaacgtctgcgcccttactcataaccttcgtggattctgggcgaaaaccgcgaaagataatgccaccctggaacgttatcgtcgggcgctgaatattaaattcaaccaaccggaacaagctgcacggacattatccggtggcaaccagcaaaaaatcctcattgccaaatgcttggaagctagcccgcaagtattgattgtcgatgagccgacgcgcggcgtggatgtcagcgcccgtaatgatatctaccagctgttgcgcagcatcgccgcacaaaatgtggctgtgctgcttatctcctccgacctggaagagatcgaactgatggcagatcgtgtgtatgtgatgcatcagggcgaaattacccactctgcactgaccgagcgcgatattaatgtcgagactattatgcgcgttgccttcggcgatagtcagcgtcaggaggcgagttgctgagctaaagtcagcgtcaggaggcgtcatgctgaagtttattcagaacaaccgtgaaatcacggcactgctggcggtggtgctgctgtttgtattacccggttttctcgaccgccagtatttaagtgtgcaaacgctgaccatggtttatagcagcgcgcaaatcctgatcctgctggcaatgggcgcgacgctggtaatgcttacgcgcaatattgatgttagtgtgggtagcattaccggaatgtgcgcggtgctgttggggatgttactgaacgcaggatatagtctacctgttgcttgtgtcgcgactttactgcttggtttgctcgcgggatttttcaacggtgtcctggtcgcgtggctaaagatccctgccattgttgccacccttggcacgttagggttgtacagaggcatcatgttgctgtggactggcggcaaatggattgaagggttacccgccgaactgaaacagctctccgccccgctgctgcttggcgttagtgcaattggttggttgacgataattctggtggcatttatggcctggctgctggcaaagacggcgtttggacgcagtttttatgccacgggcgataatttacagggcgctcgtcaactgggcgttcgtactgaagccattcgcattgtggcatttagcttgaacggctgcatggcggcactggcgggaattgtgtttgctagccagattggttttatccccaaccagaccggtaccgggctggagatgaaagcaattgcagcctgcgtgctgggcggcattagtttgctcggtggttccggtgcgatcattggtgcggtactcggcgcatggttcctgacgcagatcgatagcgtactggtgctgttgcgcattccggcatggtggaatgattttatcgcgggtctggttctgctggcggtgctggtgtttgatggacgcctgcgttgtgcgctggaacgtaatctacggcggcaaaaatatgcccgctttatgacgccaccgccatccgttaaacccgctagcagtggtaaaaaacgggaggccgcataatgcgtattcgctacggttgggaactggctcttgccgcactgctcgttattgagattgtcgcatttggtgcaattaacccgcgaatgttagatctcaatatgttgctgttcagcaccagtgactttatctgcattggcattgtcgccctaccgctaacgatggtgattgtcagtggcgggatcgatattagctttggtagcaccatcggcctctgcgccattgcattgggcgtactgtttcaaagtggtgtgccgatgccgctggcgatactcctgaccttactgctcggcgcattgtgcgggctgatcaacgccggattaattatctataccaaagttaacccgctggtgattacgcttggcacgctgtatctgtttgccggaagcgctctgctgctttccggtatggccggagcgacggggtacgaaggtattggtggattcccgatggcgtttacagatttcgctaacctggatgtgctgggactccccgttccgctgattatcttcctgatatgtctcctcgttttctggctctggctgcataaaacccatgccggacgtaatgtgtttttgattgggcaaagcccgcgcgtggcgctttatagcgcgattccagttaaccgtaccttatgtgcgctctatgccatgacggggctggcgtctgcggtcgccgctgtgctgctggtaagctattttggtagtgcacgttccgatctcggtgcgagctttctgatgcccgccatcaccgccgtggtgcttggcggggccaatatttatggtggttccggttccattatcggcaccgccattgcggttttattagtgggatatttgcaacaaggtttgcaaatggcaggagtgccaaatcaggtgtccagcgccctttccggtgcgctacttatcgtcgttgtcgtaggtcgttccgttagcctgcatcgccagcaaattaaagagtggctggcgcgtcgggccaataacccattgccataaaggatatcttcatgacacttcatcgctttaagaaaatcgccttacttagcgctcttggcattgccgcaatctctatgaatgtgcaggccgcagagcgtattgcatttattcccaaactggttggcgtgggattttttaccagcggtggcaacggcgcacaacaagcgggtaaagagctgggcgttgatgtgacctacgacgggccgacagaacccagtgtttctggtcaggtacagttgattaataacttcgtcaatcaaggttataacgccattatcgtttctgcggttagccctgatggcttgtgtccggcactgaaacgcgccatgcaacgtggtgtgagagtgctgacctgggactctgatactaaaccggagtgccgctcttactacattaatcagggaacgcccgcccagttaggaggtatgttggtggatatggcggcgcgtcaggtgaataaagacaaagccaaagtcgcgtttttctacagtagccccaccgttacggaccaaaaccagtgggtgaaagaagcgaaagcgaaaatcgccaaagagcatccaggctgggaaattgtcactacgcagtttggctataacgatgccactaaaagcttacaaaccgcagaaggaatattaaaagcgtatagcgatctcgacgccattatcgcccccgatgccaacgccctgcccgctgccgcacaagccgcagaaaacttgaaaaatgacaaagtagcgattgtcggattcagtacgccaaatgtgatgcgcccgtatgtagagcgcggcacggtgaaagaatttggcctgtgggatgtggttcagcaaggcaaaattagtgtgtatgtcgcggatgcattattgaaaaaaggaagtatgaaaacgggcgacaagctggatatcaagggcgtaggtcaggttgaagtcagcccaaacagcgttcagggctatgactacgaagcggatggtaatggcatcgtactgttaccggagcgcgtgatattcaacaaagagaatatcggcaaatacgatttctgatgtgcattacttaaccggagtaagttatggcagatttagacgatattaaagatggtaaagattttcgtaccgatcaaccgcaaaaaaatatcccttttaccctgaaaggttgcggtgcgctggattggggaatgcagagtcgcttaagccggatatttaatccgaaaacgggtaaaaccgtgatgctggcttttgaccatggttattttcagggaccgactaccggacttgaacgcattgatataaatatcgccccgctgtttgaacatgccgatgtattaatgtgtacgcgcggcattttgcgcagcgtagttccccctgcgaccaataggccggtggtactgcgggcgagtggtgcgaactctattctggcggaattaagtaatgaagccgtggcgttaagcatggatgacgccgtgcgcctgaacagttgcgcggtggcggcgcaggtttatatcggcagcgaatatgaacatcagagcatcaaaaatattattcagctggttgatgccggaatgaaagtgggaatgccgaccatggccgtgactggcgtgggcaaagatatggtgcgcgatcagcgttatttcagcctcgcgactcgaatcgccgctgaaatgggggcgcaaattatcaaaacctattatgtcgaaaaaggttttgaacggattgttgccggatgtccggtacccattgttattgctggcggtaaaaaattaccggagcgcgaggcgctggaaatgtgctggcaggctatcgatcagggcgcttctggtgtggatatggggcgtaatattttccagtctgaccatccggtggcgatgatgaaagccgtacaggcggtggttcaccataacgaaacggctgatcgggcatatgaactctatctgagtgaaaaacagtaactgcggatctaaggagaagaattatgcacgtcacactggttgaaattaacgttcatgaagacaaggttgacgagtttatcgaagtttttcgccagaaccacctgggctctgtacaggaagaaggcaatttgcgcttcgatgtcttacaggacccggaagtgaatagccgcttttatatctacgaagcctataaagatgaagacgcagtggcgttccataaaaccacgccccactacaaaacctgtgtcgcgaaactggaatctttaatgaccgggccgcgtaaaaaacgtctgttcaatggtttgatgccgtgaggcgaatttatcaattttatctacaattggggtaacgcgctgacgggagtaaaaaaatgtctgactggaacccctctttatatctacacttttccgctgaacgaagccgtccggcggtggagctgcttgccagagtgccgctggaaaatgtcgaatatgttgccgatcttggctgtggcccaggtaacagcaccgcccttctacaacaacgttggcctgcggccaggataacaggcatcgacagctctccggcgatgattgctgaagcgcgcagtgctttgccagactgccagttcgtggaagcagacatccgcaactggcaaccggtacaggcactcgatctgatttttgctaatgccagtctgcaatggctgcccgaccactacgaattgtttcctcatctggtttctttacttaatccgcagggcgtgctggcagtacagatgccagataactggctggagccgacccatgtgctcatgcgcgaagttgcctgggaacaaaactacccggatcgcgggcgtgagccgttggctggcgttcatgcttactacgatattttgagcgaagccggatgtgaggtcgatatctggcgaaccacctactatcaccagatgccgagtcaccaggcgattatcgattgggtgactgccactggattacgtccgtggttacaggatctgaccgagagcgaacagcagctttttcttaagcgctaccatcagatgctggaagagcagtatccactgcaagagaacggacagatactgctggcatttccgcgtctgtttattgttgcccggcgtatggagtaaatatcacgtcagctggtaatgacgatcgggaagaatttttgctggaatttcggcttcatcgttcatctgtaacaggtcaatttcaatagcgttgcagatggcatccagtggtaaatcattgttttcagtaccgaacggatcttccagttcttccgccagacaatccaggctaataaaagtgtaggaaatcagcacagagataaaaggcgtcatgtaatgcaggtccacgaccagcgcgaacggcagcatgatacaaaacagataaacggtacgatgcaaaatcagggtgtaggcaaagggaattggcgtataggcaatgcgctcgcatcctgccaggaccgcactaatatcattaagccgatcgttgaggctaataaacaggatatcactaagctgtccattgcggcgctgaaccgccaaccattctcccattattaacaagatacggttagctggagagttgctagccagtacacgctgaagatcttcagtcttgagataatgagccagcacttccgcctgtggctgtttgcgtaatgtcatgcgtaaacagtgggcgaaagcgatttgcagccgggcaaactcccttacacttgcgctatccggcaatgtcgtttttacctcgcgcagtaagctccgactggcaatcatcaactgcccccaaagttttcgcgcttcaacgtaacgggcgtacccggcattattacgaaaaccaagaaaaatggcgatggcgacaccgagaatgctgaacggtgcgagggtgaatttgatgcccagatgcgtgtaccagggcagcatgaaaataacagcgatagaaaagagaaaattgagtagtaagcggctggatatcttggataatacactgccgtgccagacaaaaatacggcgcagccagtgttgttgtggacgaacaatcatggttatcttcaggcgtggaaaagtcgccctattaaacgtgattacgatcacattctcaagacgctacttacaaattacctacaagcttacaacattagcaggcgctgcatgtggcacctgttaatgataaaggcatataggatgttgtaactaatatggtgaaataagaaacccggtcgaaaccgggttcagaagtaacggtgttattagcacaacggacgtacagcttcgcgcatccctttttcgagaatcgcatccaggtcattagcaacctgctcgaccagaccaggcacttgcgtcaggtcctgctcccagtggtctttttctgccaaaacaatcgctaccagttcctgggtgccgataacacggtcacgatgctggctccagagttgctgataacgttccagccagtgtgcatcgtcctgtaccggatatgtttcgccgttacgctcaccacgatagaacgcaatcaatgccgctaatgcgaaagtaaggcgcgccggaagtgtgccgtttgccttctgccctgccagcagctgtggcaggatgcgggtgcggaacttggtcataccgttgagcgcgatagacagcagctgatgcttaatgtacgggttacggaaacgcccggtgactgcactggcgaaagattccagttcatcacgaggcaaatccagtaccggaataatttcttcgtagatagctttttcaacgaatgcgcaaatttcagcatcgttcatcgcttcacctacggtatccagccctgcctggaacgccaccggcaccagcgcggtgtgcgcaccgttgaggattgccactttgcgttctttgtacggtttaatatcgtcaacaatcagcacgttgagcggatatttgtccagacgcagttcagtcgctaaggatttcggtccctgaatcacaaacaggtaaaagtgttcagcggtgtcgagaaaaccatcgtgataacccagttcttcttccagtttagccacttcatcgcgcggataaccggtaacgatacggtccaccagcgtagaacagaagctgttagcctgatccagccattgaataaatgcttctggcagtgcccactcttgcgcatagcgcagcaccagttcacgcaacgcgtcgccattgtagtcaatcaactcacacggaatgatgatccaacctttatccagcgcaccgttgaaatggctaaagcgttcgaacagcagacgggtcagttttgccggatagcttaccgctggcgcgtcatcgaatttatcgcccgcatggtagctgatacccgcttcggtggtgttagagaaaacaaagcgcatttccgggttgtgcgccagtttcaggaattcatcgtattcactgtagacgctgatttcacgattaacgctgcgaatcagacgcgcgtcgctgaccgcttcccccttctcattcaggccacggataatggtggtgtacagaccatcctgcgtgctcagactcggcgggaaactagtttcaatcggacgaacaacgaccacgccagaattcagatcggtgtgctcattcaggagatcgatttgccagtcaacaaaggcgcgcaggaagttaccttcaccaaactgaatgatacgttctggatactgtgcaccgggaaaatcgcgacgatttagtgttttcacaatgggttcccttctgattagtcatacaacctgtttgaattggtacgacaggttagcaaactttaatacgccgaacccctgttttgatcaactcctgatgattaatgagcagttttatgagaaaagtgtggcgcggatcatggtttaatcgaggaaaaacgccttttcctggatcataaagtggtagaacacattgcattcaaatcgcgcgtaatgaataaagatgtcagacaacttcctcaccgtaacgcatagtgctggtacggttgcgcccatctttcttgctgcgatacagacacgtatcggcttcgaccatcaatttattaaagtcatcggtcagcgttaggtagcttgcgcgaccactaccgacgccaatacttaccgtgagataaagcgttttttgttgccaggtgaatggttgcagttcaacgcctttacggattttttccgccattagcagaccatcgacaggattcacgctcggcactgcaacagcaaattcttcgccgcccattcgcgccaccagccccttatcaccgacaatcttctgaatatgccgggcaaacacgcttaacactttatcgccacattcatgtccatagttatcgttaatgcttttgaaatagtcgatatcaagcagcatgacagtcagatgttgtgtctgtttcaggcttggacttttcagcgcctcataaagaccggaccgactgtaaacctgagtcagaaaatcaaagtcggctcgcagcgcaacttgcttcattaggctattgatcgctgccacgctaaaagaaaccataattgggcatatcgccatcgtggcaataccgagacgtgcggagaacatttgcggaatggagaacgggctaccgacgctgatatcaatcacgctatttgccaccagtacgatttccaccgcaccggtgacaaaggtcaacagacatgttacctgcggcgtatagcgcactgcacaccagattaatgcaggcagcgggaacgccagactccccgctccgccaatgactacgctggcaataacgctcacaataagcgcgatggcgggcatcatctgttctgctttaaagcgcggcagcactccaggaatagccaacgtcagcatacaaggcacgatcaacacgcccgtactgaattgctcactgaaccagtccgcaagcaaaggccagaaatccagactatcaatactgaccgaaccaagatagcatgttcgctgacagcggcggcaaataaaggtaccctgggaatgctattttgtcgttttccgcaattctcatggctgattcatctgtacaaccagccagtgatagattaccgccacgatataacgttgttgttcttcgcttaagctaacaccctgcggaatgttatgccacttagccagacaaccgcgacagcaggtcgcggtggcgtgctgagcgataaacaccggatgcccgcgcatgggggtttgcttaccgtcattagccggtaatgccggagcaagacgtttagcgacaaaatccgccgcatgttgttcgatgactggcgcgcctttctccaggcaatactgacgctctttcatgcccagacgaaagcgagagcgaaatttactacgggataaacgcgcgaagagtggatcgagagactgcattaataaacgctacgccctaactgtttcgtcaattgttcaagaacggcaatacccgcaaggctgttacctgcatcatccagttccggactccagacagcgatggccatttcatgcggaacaatcgccacaataccgccaccaacgccagatttcgccggtagccccacccgccaggcaaactcccccgcgttctggtacataccactggtcgccatcagcgcgttaatttgccgcgcctgcattggcgtcaccactggttcatcaatatgaatagctttcccctgattagccagaaagacaaacgtccgggccagctctacacagctcattttcagagcgcagtaatgaaagtagttttgcagaacggttgtcacgtcatgatggaaattgccaaagctcttcatcagccaggcgatagccgcatttcgcgcggaatgttcaaattcggaacgcgctaccaccgtatcgtaggaaatatcagacacaccgcttaagccgcgcacgacttccagcatacgttgccgtggtgcgcttaatcgcccttgcaacatatcgcagaccaccagcgcaccggcattaatgaacggattacgcggtataccctgctccatttccagttgcactaaggaattgaacggacttccagacggatctttgccgacgcgttgccagatttcctcttcggagtaatgacgcatggcgacaacgagactcagcactttggaaatagactgaatggaaaaacgttcttgcgcgtctccggcctgaaaaagctgtccgtcaacggtacagatagcaatccccaatcgggaaccgtctactgtagccagcgccggaatataatccgcgactttaccctgaccaatgagcggccgcacttgccgcaagatgttttctaaaattgcattatccatggcgactgccactttctactcctggaccgcaggtctgaaaagacctgcgagtatatcagagctgaatatgtcgcgtcagatccggtctttccacaccgtctggatattacagaattcgtgtaagccgaaatgggaaagctcacgaccaaagccactctttttcacgccaccaaaggccactcgcgcgtcgctggcacaataaccattgataaacaccccaccgcattccagacgtgccgccatctgtctggcctgtgtttcgtcagtggtaaaaatggtcgcactaaggccgaactcactatcattagccagttccagtgcatgttctgcatctttcgcaatggtgattgccgcaacggggccaaacatttcttcccgaaacgcggtcatttctggggtaacattcgccagaaccgttggcggatagtagttacctgccccagccatcttttccccgcccagtaacaaacgcgcaccctgcgccagggttttctccacctgatgatgcagctcatcacgtaaatcaaaacgagccattggtccgagagcgttctcttcgtcacggggatcgcccattttcaaggctgccgcagctgccacaaaacgttcggtaaatgcgctagcaattccctcttcgataataaagcgttttgccgctgcacatacctgtccggtattctgataacgtccggctaccgccgctttcaccgccagttccagatcggcatcgttaagcacaataaacggatcgctaccgcccagttccagtacgcattttttcagtgccgctccagcctgtgcgccaatagccgctcccgcacgaacacttccggtcaccgtgacagcagcaatgcggctgtctttaatcatctgactgacaccgtcgttgtcggcattcagccagccatatacgccttgtgggatacccgcatctttaaacacctgggcaatgagctgtgcacagcccatcacattcggcgtatgtttaagtaagtagccgttacctgcaagaatgatgggaacagcgccacgcatcacctgccataacggaaaattccacggcataatcgccagaatcgtccccaacggtcgatactcaataaccgcctgctgattttccaccagcgtaggttccgccttcagcattgccggaccatgttctgcataccagtcacacaaattcgcgcttttcgccacttcagcgcgcgcctggttgattggtttgcccatttcgcgggtgatcatttgcgccatttcttcgctacgagcgcgcagagccttaccgatatcacgcagtttttcagcacgataatctatatttgtctcgcgccagtcgcgaaagcctgctgccgccagctgaagtgcgttttcgatatcgtcagcgccagcccacggcagcacagaaagttgttcacccgtggcaggatttatgctaattgcatgagttgccggagtaatggtcatcggggtatctcctttatgagtcatggtatgaagatacgcagatttactcttgctttaaaatgaataatattaagccacttattcacgaatcgagaatgctatggatctgacccaactggagatgttcaacgcggttgccgaagctggcagcataacccaggctgcagcaaaagtgcatcgcgtgccgagcaatctcactacccgtctgcgccagctggaaacagaactgggggttgatctgtttattcgcgagaatcagcgtttacgtctctctcctgccgggcataactttttacgctatagccaacaaattctcgcgttagtggatgaagcgcggagcgttgtcgctggcgatgagccgcaaggtttattttctcttggtagcctggaaagcaccgctgcagtgcgcattccagccacgctggcggaattcaaccgtcgttatcccaaaattcagtttagtctttccaccggcccttccggcactatgctggatggtgtactggagggaaaactgaatgcggcgtttattgatggacccattaaccatactgccatcgacgggataccggtataccgcgaggaactgatgatcgtcacgccacaaggatatgcgccagtaacccgtgccagtcaggttaatggcagtaacatttatgccttccgcgccaattgtagctatcgtcgccacttcgagagctggtttcatgctgacggtgccgctccgggaactatccatgagatggagtcttatcacggaatgttggcctgtgtgatcgcaggagcaggcattgcgcttattccgcgctctatgctggaaagtatgccggggcatcaccaggttgaagcgtggccgttagctgagcaatggcgttggttaacaacctggctggtctggcgtcgtggtgcgaaaacacgtccgctcgaggcatttattcaactgctggatgtgcctgacagcgcaagacagggatatcaatgagctatttttgatagttcttgcggttaatatgctctatatagtgatgttccgatgacttatgactatatggggcaaatatggttacgccagtaagcatcagcaattacatatctcttcctgatgattttcccgtacgtaatattgcaccgcaggtaaaagaagttttaaaggattttattgatgcacttagtacaataatatgtaatgaagagtggcgcacgtctttaaacatcaacagtgccacaaaaaagatatttaataaccttgacaacttaagttatattcagaggacttcttttcggggtaacgacacgctatacaatgaaaaggttcagtttaaactcacttatcccgccaggaatggaagacacaaagaaaatattgaatttcaggtagtaataaatttaagccctatttatttagataattttcgccatgatggagaaattaatattttttgcgctcccaacccaaagcctgtcactatggggcgcgtatttcagaccggcgtcgagcgtgtactctttctgtttctgaatgattttattgaacaatttccaatgatcaaccctggtgttcccatcaaaagagcgcatacaccacatattgaacccctgcctagcgatcaccataccgctgcagattacttacgccagtttgatttgcttgtcctgaattttatctctcgcggtaattttgtcatactcccccgattatggagtaactctgaggttcacagatggttcgtcaataaagatcctaacttgatcaccgccattctcgacataacggacagcgaattaaaagaggatttgttgcaaagcctgatggatagtttaggttctaacaaacatgtactacccgaagtctgcatctgctttttatcccttttagcagaacaagaatctcctcattttcagaacttgtttttatttttcgccaatatgttattgcactatcaccaatttatgaatcccaatgaaagtgatttgaatgacgtgttgatgccagcaagtttaagtgatgataaaattatcaaacatatggcgcgcaggaccctcaaactgtttgtaaaaaatgaaacaccgccaaaagttactcacgaagacctggtgaaaaacaggcctcgctcccctgtcagaccacctatacccgcaaccgccaaaacgccagacctccctgaacgtcattaaaccgtgatgttaccgactctctgacgcgtgaaagaatcagcgtcagagaaacggaaaacgcgatccagatcacaaatgcattgtattcacatcattaaccgttttaagatcatttcatcactttttcgcaactcacccgataatctgttatgacaacaaacactgtttcccgcaaagtggcgtggctacgggtcgttacgctggcagtcgccgccttcatcttcaacaccaccgaatttgtccctgttggcctgctctctgacattgcgcaaagttttcacatgcaaaccgctcaggtcggcatcatgttgaccatttacgcatgggtagtagcgctaatgagtttgccttttatgttaatgaccagtcaggttgaacggcgcaaattactgatctgcctgtttgtggtgtttattgccagccacgtactgagctttttgagctggagctttaccgttctggtgatcagtcgcattggtgtggcttttgcacatgcgattttctggagcattacggcgtctctggcgatccgtatggctccggccgggaagcgagcacaggcattgagtttaattgccaccggtacagcactggcgatggtcttaggtttacctctcgggcgcattgtgggccagtatttcggttggcgaatgaccttcttcgcgattggtattggggcgcttatcacccttttgtgcctgattaagttacttcccttactgcccagtgagcattccggtagtctgaaaagcctcccgctattgttccgccgcccggcattgatgagcatttatttgttaactgtggtggttgtcaccgcccattacacggcatacagctatatcgagccttttgtacaaaacattgcgggattcagcgccaactttgccacggcattactgttattactcggtggtgcgggcattattggcagcgtgattttcggtaaactgggtaatcagtatgcgtctgcgttggtgagtacggcgattgcgctgttgctggtgtgcctggcattgctgttacctgcggcgaacagtgaaatacacctcggggtgctgagtattttctgggggatcgcgatgatgatcatcgggcttggtatgcaggttaaagtgctggcgctggcaccagatgctaccgacgtcgcgatggcgctattctccggcatatttaatattggaatcggggcgggtgcgttggtaggtaatcaggtgagtttgcactggagtatgagcatgattggttatgtgggcgcggtgcctgcttttgccgcgttaatttggagtatcattatatttcgccgctggccagtgacactcgaagaacagacgcaataattgaaaggcccattcgggccttttttaatggtacgttttaatgatttccaggatgccgttaataataaactgcacacccatacataccagcaggaatcccatcagacgggagatcgcttcaatgccacccttgcccaccagccgcataattgcgccggagctgcgtaggcttccccacaaaataaccgccaccaggaaaaagatcagcggcggcgcaaccatcagtacccaatcagcgaaggtactactctgacgcactgtggacgcgctgctaataatcatcgctatggttcccggaccggcagtacttggcattgccagcggcacaaaggcaatattggcactgggttcatcttccagctcttcgctcttgcttttcgcctccggactatcaatcgctttctgttgcggaaagagcatccgaaaaccgataaacgcgacgattaagccgcctgcaattcgcagaccgggaatgctaatgccaaatgtatccatcaccagttgcccggcgtaatacgccaccatcatgatggcaaatacgtacacgctggccatcaagctctgacgattacgttcggcactgttcatgttgcctgccaggccaagaaataacgcgacagttgttaatgggttagctaacggcagcaacaccaccagccccaggccaattgctttaaacaaatctaacattggtggttgttatcctgtgtatctgggttatcagcgaaaagtataaggggtaaacaaggataaagtgtcactctttagctagccttgcatcgcattgaacaaaacttgaaccgatttagcaaaacgtggcatcggtcaattcattcatttgacttatacttgcctgggcaatattatcccctgcaactaattacttgccagggcaactaatgtgaaaagtaccagcgatctgttcaatgaaattattccattgggtcgcttaatccatatggttaatcagaagaaagatcgcctgcttaacgagtatctgtctccgctggatattaccgcggcacagtttaaggtgctctgctctatccgctgcgcggcgtgtattactccggttgaactgaaaaaggtattgagcgtcgacctgggagcactgacccgtatgctggatcgcctggtctgtaaaggctgggtggaaaggttgccgaacccgaatgacaagcgcggcgtactggtaaaacttaccaccggcggcgcggcaatatgtgaacaatgccatcaattagttggccaggacctgcaccaagaattaacaaaaaacctgacggcggacgaagtggcaacacttgagtatttgcttaagaaagtcctgccgtaaacaaaaaagaggtatgacgatgtccagacgcaatactgacgctattaccattcatagcattttggactggatcgaggacaacctggaaagcccactgagtctggagaaagtgagtgagcgtagcggttactccaaatggcacctgcaacggatgtttaaaaaagaaaccggtcatagtttaggccaatacatccgcagccgtaagatgacggaaatcgcgcaaaagctgaaggaaagtaacgagccgatactctatctggcagaacgatatggcttcgagagccaacaaactctgacccgaaccttcaaaaattactttgatgttccgccgcataaataccggatgaccaatatgcagggcgaaagccgctttttacatccattaaatcattacaacagctaattgaaaacgtgacaacgtcactgaggcaatcatgaaaccacttagttccgcaatagcagctgcgcttattctcttttccgcgcagggcgttgcggaacaaaccacgcagccagttgttacttcttgtgccaatgtcgtggttgttcccccaagccaggaacacccaccgtttgatttaaatcacatgggtactggcagtgataagagcgatgcgctcggcgtgccctattataatcaacacgctatgtaatttgttctggccccgacatctcggggcttattaacttcccacctttaccgctttacgccaccgcaagccaaatacattgatatacagcccggtcataatgagcaccgcacctaaaaattgcagacccgttaagcgttcatccaacaatagtgccgcacttgccagtcctactacgggcaccagtaagcttaacggtgcaacccgccaggtttcatagcgtcccagtaacgtcccccagatcccataaccaacaattgtcgccacaaacgccagatacatcagagacaagatggtggtcatatcgatagtaaccagactgtgaatcatggttgcggaaccatcgagaatcaggctggcaacaaagaagggaatgattgggattaaagcgctccagattaccaggctcatcaccgccggacgcgtactgtggctcatgatctttttattgaagatgttgccacacgcccaactaaatgctgccgccagggtcaacataaagccgagcatcgccacatgctgaccgttcagactatcttcgattaacaccagtacgccaaaaatcgctaaggcgatccccgccaattgtttgccatgcagtcgctccccgaaagtaaacgcgccaagcatgatagtaaaaaacgcctgtgcctgtaacaccaggctagccagtccagcaggcataccgaagttaatggcacaaaaaagaaaagcaaactgcgcaaaactgatggttaatccataccccagcagcaaattcagtggtactttcggtcgtgcgacaaaaaagatagccggaaaagcgaccagcataaagcgcaaaccggccagcatcagcggtggcatgttatgaagccccactttgatgaccacaaaatttagcccccatacgaccactaccagtagcgccaacaccccatcttttcggctcattctaccgcctctgaatttcatcttttgtaagcaatcaacttagctgaatttacttttctttaacagttgattcgttagtcgccggttacgacggcattaatgcgcaaataagtcgctatacttcggatttttgccatgctatttctttacatctctaaaacaaaacataacgaaacgcactgccggacagacaaatgaacttatccctacgacgctctaccagcgcccttcttgccagcagcttgttattaaccatcggacgcggcgctacgctgccatttatgaccatttacttgagtcgccagtacagcctgagtgtcgatctaatcggttatgcgatgacaattgcgctcactattggcgtcgtttttagcctcggttttggtatcctggcggataagttcgacaagaaacgctatatgttactggcaattaccgccttcgccagcggttttattgccattactttagtgaataacgtgacgctggttgtgctcttttttgccctcattaactgcgcctattctgtttttgctaccgtgctgaaagcctggtttgccgacaatcttagctccaccagcaaaacgaaaatcttcagtatcaactacaccatgctaaacattggctggaccatcggtccgccgctcggcacgctgttggtaatgcagagcatcaatctgcccttctggctggcagctatctgttccgcgtttcccatgcttttcattcaaatttgggtaaagcgcagcgagaaaatcatcgccacggaaacaggcagtgtctggagcccgaaagttttattacaagataaagcactgttgtggtttacctgctctggttttctggcttcttttgtaagcggcgcatttgctagttgcattagtcaatatgtgatggtgattgctgatggggattttgccgaaaaggtggtcgcggttgttcttccggtgaatgctgccatggtggttacgttgcaatattccgtgggccgccgacttaacccggctaacatccgcgcgctgatgacagcaggcaccctctgtttcgtcatcggtctggtcggttttattttttccggcaacagcctgctattgtggggtatgagtgctgcggtatttactgtcggtgaaatcatttatgcgccgggcgagtatatgttgattgaccatattgcgccgccagaaatgaaagccagctatttttccgcccagtctttaggctggcttggtgccgcgattaacccattagtgagtggcgtagtgctaaccagcctgccgccttccagcctgtttgtcatcttagcgttggtgatcattgctgcgtgggtgctgatgttaaaagggattcgagcaagaccgtgggggcagcccgcgctttgttgatttaagtcgaacacaataaagatttaattcagccttcgtttaggttacctctgctaatatctttctcattgagatgaaaattaaggcaagcgaggaaacacaccacaccataaacggaggcaaataatgctgggtaatatgaatgtttttatggccgtactgggaataattttattttctggttttctggccgcgtatttcagccacaaatgggatgactaatgaacggagataatccctcacctaaccggccccttgttacagttgtgtacaaggggcctgatttttatgacggcgaaaaaaaaccgccagtaaaccggcggtgaatgcttgcatggatagatttgtgttttgcttttacgctaacaggcattttcctgcactgataacgaatcgttgacacagtagcatcagttttctcaatgaatgttaaacggagcttaaactcggttaatcacattttgttcgtcaataaacatgcagcgatttcttccggtttgcttaccctcatacattgcccggtccgctcttccaatgaccacatccagaggctcttcaggaaatgcgcgactcacacctgctgtcacggtaatgttgatatgcccttcagaatgtgtgatggcatggttatcgactaactggcaaattctgacacctgcacgacatgcttcttcatcattagccgctttgacaataatgataaattcttcgcccccgtagcgataaaccgtttcgtaatcacgcgtccaactggctaagtaagttgccagggtgcgtaatactacatcgccgattaaatgcccgtaggtatcattaaccaatttaaatcggtcaatatccaacaacattaaataaagattcagaggctcagcgttgcgtaactgatgatcaaaggattcatcaagaacccgacgacccggcaatcccgtcaaaacatccatattgctacggatcgtcagcaaataaattttgtaatcggttaatgccgcagtaaaagaaagcaacccctcctgaaaggcgtcgaaatgcgcgtcctgccagtgattttcaacaatagccagcattaattcccgaccacagttatgcatatgttgatgggcagaatccattagccgaacgtaaggtaattcatcgttatcgagtggccccagatgatcaatccaccgaccaaactggcacagtccataagaatggttatccgttatttctggcttactggcatctctcgcgaccacgctgtgaaacatactcaccagccactggtagtgggcatcgatagccttattgagatttaacaagatggcatcaatttccgttgtcttcttgatcattgccactcctttttcacagttccttgtgcgcgctattctaacgagagaaaagcaaaattacgtcaatattttcatagaaatccgaagttatgagtcatctctgagataacattgtgatttaaaacaaaatcagcggataaaaaagtgtttaattctgtaaattacctctgcattatcgtaaataaaaggatgacaaatagcataacccaataccctaatggcccagtagttcaggccatcaggctaatttatttttatttctgcaaatgagtgacccgaacgacggccggcgcgcttttcttatccagactgccactaatgttgatcatctggtccggctgaacttctcgtccatcaaagacggccgcaggaataacgacattaatttcaccgctcttatcgcgaaaaacgtaacggtcctctcctttgtgagaaatcaaattaccgcgtagactaacgctagcgccatcgtgcatggtttttgcgaaatcaacggtcattttttttgcatcatcggttccgcgatagccatcttctattgcatgaggcggcggtggcgctgcatcctgttttaaaccgccctggtcatctgccaacgcataaggcatgacaagaaaacttgctaatacaatggcctgaaatttcatactaactccttaattgcgtttggtttgacttattaagtctggttgctatttttataattgccaaataagaatattgccaattgttataaggcatttaaaatcagccaactagctgtcaaatatacagagaatttaactcactaaagttaagaagattgaaaagtcttaaacatattttcagaataatcggatttatatgtttgaaaattattatattggacgagcatacagaaaaagcaaatcacctttacatataaaagcgtggacaaaaaacagtgaacattaatagagataaaattgtacaacttgtagataccgatactattgaaaacctgacatccgcgttgagtcaaagacttatcgcggatcaattacgcttaactaccgccgaaagttgcaccggcggtaagttggctagcgccctgtgtgcagctgaagatacacccaaattttacggtgcaggctttgttactttcaccgatcaggcaaagatgaaaatcctcagcgtaagccagcaatctcttgaacgatattctgcggtgagtgagaaagtggcagcagaaatggcaaccggtgccatagagcgtgcggatgctgatgtcagtattgccattaccggctacggcggaccggagggcggtgaagatggtacgccagcgggtaccgtctggtttgcgtggcatattaaaggccagaactacactgcggttatgcattttgctggcgactgcgaaacggtattagctttagcggtgaggtttgccctcgcccagctgctgcaattactgctataaccaggctggcctggcgatatctcaggccagccattggtggtgtttatatgttcaagccacgatgttgcagcatcggcataatcttaggtgccttaccgcgccattgtcgatacaggcgttccagatcttcgctgttacctctggaaaggatcgcctcgcgaaaacgcagcccattttcacgcgttaatccgccctgctcaacaaaccactgataaccatcatcggccaacatttgcgtccacagataagcgtaataacctgcagcatatccgccaccaaaaatatgggcgaaataactgctgcgatagcgtggcggtatagcaggaagatccatattttccgccaccagcgcccgcaattcaaaatcatcgacatcctgcattgcttcgttttcttccaggcaatgccagcgcatatcgagaagtgcggcgctaagcagttcgctcatctcataccctttgttgaacaggctggcattacgcattttctgttgcagttcgtcaggcattgctgccccgctctgataatgccgggcgtagcgagcgaatacctgcggatgcgttgcccagtgttcgttgatttggctcggaaattcgacaaaatcacgcggcgtgttggtgccggaaagcgtggcataacgctggcgggcaaaaaggccgtgcagcgtatgaccaaattcatggaataaggttatgacatcatcccagagtaacaacgcaggctcaccggcagcgggtttctgataattgcagacgttataaattaccggatgtgttttattaagcgtactttgctcaacaaaattgcccatccatgcaccgccgcttttactatcacgggcgaagaaatcaccgtaaaataacgccagccccacgccattatgatcaaaaatttcccacacacgaacgtcaggatggtagacaggaatatcaaaacgttcgacaaacttaataccgaagagctgattcgcggtccagaatacaccttcatttaacaccgtgtttaattcaaaatatggcttgagctgcgcctcatcaagatcaaatttctcccgccgtacctgttccgcataaaatgcccagtcccacggctgcgcgctaaacccgccctgctgcttatcgataaccgcctgtatggaggctaattcatcgctcgcacgttgacgcgccgctggaacaatttcccgcataaagttaagtgctgcttcaggtgtttttgccatctgatcggcgattttccatgcggcataatgaggaaaaccaagtagtgttgcctgttgtgcacggatctccaccagacgttgaatgatagcgcgggtatcattggcatcatttttttccgctcgcgtccagcccgcaataaacagtttttcacgcgtcgcacgatcgcgcatttcggcaagcgccggttgttgggtggtattcagcagcggaatcagccatttgttatccagacctttctcgcgagccgcctctgccgccagcgcaatctcttgctcactcattcctgccagctgcgcgatatcgttcacaaccagaccgccggatttatttgctgccagtaatcgctggttaaactggctggtcagggtcgcagcttctgtattcagtacttttaattttgctttatcagcttgcgcaagtttggctccggcaaggacaaaacgttgatgaatcacctccaccaggcggatggattcactatcaagccccagggattcacggcgctgccagacagcatctacccgcgcgaataattcaccgttcagatagatatcattagccagttccgccagttcagcggaaaactgctcgtcaagacgctgtaattcatcattggtatgcgccgcagtcatcgcaaaaaagacgctggtaacgcgggtaagtaattctccgctttgttccagtgccagaatagtattgttgaaatcaggcatttgcgggttaagcgcgatggcagcaatttctgcccgcttttgctgcattccctcatcgaatgccgggcgatagtgatgattggcaatttgatcaaaatggggagccagatacggcagtgtgctttgcacaaggaaaggattcattgttgtcattttcttctcctgaacgcgaggtgttccatagcgtaggcttactgataacggagtgcaatcttgcaatccagtattacccgctcttaagcatcccgtgctatgttattgacacacaaaagcgttgaggaacagtgagaagcgcagtgcccagccatcccgatactgctgctttcaccaaatccttagtgcttctttcgtgtttttctattgtcataatggttatctctaaaaaagaggtaagatgcgtactacttactcgccgttattggtattattcagaaaaagtgagtaagactttgcagcaatgtttttgatcctgttcaaataaactaatggcatcagcaacatgctggaaatcaaacgtatgggtaattaatttttctggtttaattaaccctttacttaaccagtcgataacgatcgggaatttatttgcatttaagcgactagagaaaatagagagttcttttccggtaattccttgctgaatcacttcagacggttcactggagaaccccatcaatacaatacgtgccgctggagaagccagcgttacggcctctttcaggatagaaggatgacaagccgcatcgataattaatgtcggcttgatgcctttttcagtgaaaatctcgccaagcggtgtctggctgttattaatcgcccagtcagccccgctctctttcgctttttccagtcgttcatcaatgcgatcggcaacaatcacatttttaacgttatagacgccttttaatacctgaacgatcgtcaggccgattggaccggcaccataaaccagaacggtatcattttcagtcggttgaccatgtccggttacgttagccgcaatggtaaaaggttcgatcattaccgcatattgatcggccactgcttcaggaattttccacgcattttttgccggaaccacggcatattcactgaaaccaccgtcagcgtgcacacctaatacagccagtgtcgtacaaacgttcggtttacctatagagcacggatagcaatgcccacagctgaccaccggatcgacagcaacacgttcaccgactctggcgctttccacgccttcacccactgcatcaatgacgccaaagaattcatgaccaatgacgcgcggatatttcgcaaaaggattatgcccacgataaatatggctatcactaccacaaattccggcaagtttcacttttactcgtacttcacccgcactcggggtgggtatttcacgttcgacaatcgccagttgattcggtttttcaattaatatgcttttcattatcttactccttaccagttccacagcgtgccatcttccagacgtgcgactggtagataagcaggttcatagggatatttcgccgccagcttttcatcgaattcgataccaagacccggtttgtctcccggatgcatatagccgttatcgaaagtccagttgtgcgggaagacttcgagcatttgttcggaataacccatgtattcctggacaccgaaattggggacccacagatcaaagtgcagcgccgcagccatgcagactggactcaaatcggaaggaccgtgactgccagtacgtacctgatacaggctagcaaaatcggcaatccggcgcataccggtaattccgcctgcatgggtcagcgtggtgcggatataatcgatgagttgctcttcaatcagttgtttgcagtcccagatgctgttgaagacttcacccactgcgatgggtgtgacggtatgttggcgaatgagacggaagcattcctggttttccgcaggcgtcgggtcttccatccagaacatgcgataatcttcaatgcttttaccaaagcgcgccgcttcaataggcgttaagcgatggtgcatgtcatgcagcaaatgttcattaaaaccaaacttgttacgtaccgcgtcaaacaatttcggcatgaaatcgaggtatttctccgtgctccacagctgctcttccggccactgtcctttggttgcgggttcataagccagacctttacctttgctcatgccgtaggtggttttcataccagggattccgcactgcacgcggatggctttgaatccaagctcttgatgacgggcataatcatccagagcttcatcaatactgtgaccggtggtatggcaataaaccatcaccccttcacgagacgcgccgccgagtaactggtaaagcggcatgttggcagctttggctttaatatcccacagcgccatatcaaccgcactaatggcgctcatcgtaaccggaccgcgacgccagtaagcacctttatagaaaaactgccagatatcttcgatacggtgcgcatcgcgaccaataagctgcggacaaaggtgatcctgcaaataagaggccacggaaagctcacgtccattgagggtggcatccccaaggcccgtaataccgtcctcagtggtgatttttaatgtgacgaaattacgccccggacaggtaacaaaaacttcagcctttacgatcttcatgttcgattccttgcatcgcttgtcgtgatgcatgaaatctacgcaactgagctactaccatacaagtataaagatcgaaaaaagccggagtgatcacaaaaaaaggcgtatatttgcgctgtgaatggttgacaaaagatgaaatagaataccttttgtcagctgacacttcctcttatcttattgataaaatggatttatgttcttacgtgcgcccccagcccgcaacaatgatcaacatgccgcaaagcgcaatcaacgcacccgtccagtcataaagagtcagtttcacgccatccacaacgcgcagccacatcaacgccgtgcagacataaacgccaccataagccgcgtaaacacgcccactcgccgctggatgcaacgttaacaaccagacaaacagcgccagactaatccccgccggaagcaacagccagatactggcgtttcgttttaaccacaaccagggcagaaagcatccaataatttcacacagcgcagtagcaaaaaatagtaacgttgttttaatcatctttgtctcttattgacatcatgtatagttatagggcgacataatatcatcaatataaacaccctcctggtacgttttgcgtccgcagtggatggtgtagaatcacctttaatcattcatacagggaatgaattatgaaaatcactctcagcaaacgaatcggcctgctcgctattctgctgccttgcgcactggcattgagcacaactgttcatgccgaaactaacaaactggtgattgagtctggcgacagtgcacaaagccgccagcacgccgctatggaaaaagagcaatggaatgacacgcgcaatctgcgccagaaagtgaataaacgcactgaaaaagagtgggataaagccgacgccgcttttgataaccgcgataaatgtgagcaaagcgccaacatcaatgcctactgggagcccaatactttgcgctgcctggaccgtcgaactggccgcgttattaccccctaacctgttattgatttaaggaatgtaaggacacgttatgccaagcgcccacagtgttaagctacgcccgctggagcgtgaagatttacgctatgtacatcaactcgacaataacgccagtgtgatgcgttactggtttgaggaaccctacgaagcctttgttgaactctctgatctgtatgataagcatattcacgatcagagcgaacggcgctttgtggtggaatgtgacggcgaaaaagccggtctggtggagctggtggaaattaaccatgttcatcgccgcgcagaatttcagataattatctccccggagtatcaggggaaaggtctggcaacccgtgccgccaaattagcaatggactatggctttaccgttctcaatctctataagctgtatctgatcgttgataaagagaatgaaaaagcgattcacatttaccgcaagcttggctttagcgttgaaggtgaattgatgcacgagttctttattaatggtcaatatcgtaatgccattcgcatgtgtatattccagcatcagtatctggcagagcacaaaacaccgggtcagactctcctgaagccgaccgcacaataacattaataataatcgatcgtatttttgatggtgtaaacccgttcgacggcgggttttactccttcatcaacaatgattagctgacagtccaccggattagcgtgactgtcatattcacagctctgttttacattaccaacccgttgattattcagtaaagtaaccgctgtgtaatctaattttttgatcggatccgtacttggcgtggcgctgacagataatgttttgtcgttacttttcgtggttttacccagcggataaccctgatcatcatagcgatattccatctgcatttgtttgctgctggctttaatcacgaagccattatcatcggtttcccaactcaccccggcagaaggtaattctgctagctggcattttccctgtaaacgtactctcttctccagcgtctcggcatcacggtaataattggcgtccagtaccagagcgaccacggtattattttccagatccagtaattcgagactatcaaaacagccttcttcgctcaaagtcccagaaacacgtttcgtcacttcaccttgctcatccattaatgtctgagtgaaatcttttaccggaccacgcagcggatcaaaatcgaattcattagagaaactggccatctcaggggtaaaactaagtgttacctctgtgcggtcacatcctgtgaggaatatcgcgagtaagcatggtagtaatttgtatttcacaacagtcaccagagagtagagatgattctcaatcatagtagcaaatacagtactttacacgttaaatgctatgcttaaagaagttatcttcgcgtaaggagcttatgatgaaactcagtacctgctgtgccgcgcttctgctcgccctcgccagtcccgcggtactcgccgcgccgggatcctgtgagcgcatacagagcgatataagtcagcgcattatcaataatggcgtacccgaaagcagcttcacgttaagtattgtacccaatgaccaggttgatcagcctgattcccaggtcgtcggccattgcgctaatgatacgcataaaattctctatacccgcaccaccagcggtaacgtctctgctcccgcgcagtctagccaggatggcgcgcctgccgaaccgcagtaacacattatcgactgaacgccggatatgacaaatccggcgatttgaacatacaacataatcccaccttattactcatacccttctattgatatggattaataattcttaacccaaaatgggtagactccctctattgttagcgcgctaaatattcaatatataaacttttatataacgataaagaacagggagtgagttatgtccaaaaatgaacgaatggtgggcatcagccgcagaacactcgttaaatctaccgcgataggttctctggcgctggctgcaggcggtttttctttgccgtttaccctgcgcaatgcagcagcagcggtacaacaggcccgcgaaaaagtggtctggggtgcctgttccgtcaactgtggtagccgctgtgcacttcgtctacatgttaaagataatgaagtgacctgggtggaaactgacaataccggcagcgatgagtacggcaaccatcaggtacgcgcctgtttgcgcggtcgctccatccgccggcgtattaatcatcccgatcgcttgaattacccaatgaaacgcgtgggcaaacgcggcgaaggcaaattcgaacggattagctgggatgaagccctggatactatcgccagtagcctgaagaaaaccgtcgaacaatatggcaatgaggctgtatatattcagtactctagcgggatcgttggcggcaatatgacccgctctagcccaagtgccagcgcggtcaaacgcctgatgaactgctacggcggtagtctcaaccagtatggctcctacagcactgcgcaaatttcctgtgccatgccctacacctacggcagtaatgatggcaacagcaccacggatattgaaaacagcaagctggtcgtgatgtttggtaacaacccggcagaaacccgcatgagcggtggtggcatcacttatcttcttgaaaaagcgcgcgagaaaagcaacgccaaaatgattgttatcgatccgcgatataccgatacggctgccggtcgtgaagacgaatggctccctattcgcccgggcaccgatgccgcgctggttgcgggtattgcctgggtattgattaacgaaaatctcgttgatcaaccttttctcgataaatactgcgtcggctatgacgaaaaaaccttacccgcagatgcacccaaaaatggtcactataaagcctatattcttggtgaaggtgacgataaaacagcgaaaacgccgcagtgggctagccaaattaccggtatcccggaggaccgtatcatcaaactggcgcgtgaaattggcacagcaaaacccgcttatatctgccagggctgggggccacaacgccaggcaaacggcgaactgactgcacgcgctattgctatgttacctattttgacgggcaatgtcggcatcagcggcggaaatagtggcgcgcgtgaaagcacctataccattaccatagaacgcctgccggtgctggataatccggtcaaaacgagtatctcctgcttcagctggacagatgctatcgatcatggtccgcaaatgacggcaatccgcgacggcgtccgcggcaaagataaactggatgtgcccattaagttcatctggaactacgcgggaaataccctcgttaatcagcattctgacatcaacaaaacgcatgaaattctgcaggacgaaagcaaatgcgaaatgattgtggtcatcgaaaactttatgaccagtagcgcaaaatatgccgacattctgctgccagacctgatgaccgttgagcaggaagatattattcctaacgactacgccggtaacatgggatatctcattttcctccagcctgtcaccagcgaaaaattcgaacgcaaaccgatttactggatcctgagtgaagtcgcgaaacgtcttggacctgacgtctatcaaaagttcacagaaggtcgcacgcaggaacaatggttacaacatctgtacgccaaaatgcttgccaaagatccggcgttaccgtcttacgacgaactgaaaaaaatgggtatctataagcgtaaagatcccaatggccattttgtcgcctacaaagcatttcgtgacgaccccgaggcaaatccacttaaaacgccttccggtaagattgaaatttattccagcaggctggcggaaattgcccgtacctgggaactggaaaaagatgaagtgataagcccattgccagtttatgccagtacctttgaaggctggaactcccctgaacgtagaaccttcccactgcaactgtttggtttccattacaaatcccgtactcacagcacctacggcaatattgatctcctgaaggctgcctgccgtcaggaggtgtggatcaaccctatagatgcgcagaaacgtgggattgccaacggcgatatggtgcgggtgtttaaccatcgtggcgaagttcggctaccagccaaagtaacaccacgtattctccctggagttagcgctatgggccagggagcctggcacgaggccaatatgtctggcgataaaatcgaccatggcggctgtgtgaatacgctaaccactctgcgccctagtccactggcgaagggaaacccgcagcacactaatctggtcgagatcgaaaaaatataacccacgacaaccataaattctggcatgacattttgtttgaaaagcaataagtgagtaatgatgaaaatccataccacagaggcgctcatgaaggctgaaatcagccgtagaagtctgatgaaaacctccgcacttggcagtcttgcgctggcaagcagtgctttcactctgccattttcccaaatggtccgggcggcagaggctccggtagaagagaaagcggtctggagttcctgcaccgttaactgcgggagccgctgtctgttacgtttgcatgtgaaagatgacaccgtgtactgggtggagtctgatacgacaggtgacgacgtctacggtaatcatcaggttcgagcgtgtttacgcgggcgctctatccgccgacggatgaatcatcctgataggttgaaatatcccatgaagcgcgtcggcaagcgcggtgaaggtaaatttgaacggataagttgggacgaagccctggataccatcagtgataatcttcggcggatcctgaaagattacggcaatgaggctgtacatgtcctgtacggaacaggcgtagatggcggaaacatcaccaacagtaacgtcccgtaccgtctgatgaactcttgcggtggttttctcagtcgctatggcagctacagtaccgcacagatcagtgccgcaatgagttatatgttcggtgccaatgatggcaacagcccggatgatatcgccaatacgaaactggtcgttatgttcggaaataacccggcagaaacgcggatgagcggcggtggtgtcacttactacgtcgagcaagcccgcgaacgtagtaacgcacgcatgatcgtcatcgatccacgttataacgacactgctgccgggcgtgaagatgaatggctgcccattcgccctggcaccgatggcgcactggcctgtgcgattgcctgggtactgattactgaaaacatggtcgatcagccatttctcgacaaatattgtgttggttacgatgaaaaaacgctgcccgccaacgcaccacgtaacgcgcattataaagcctatattctgggcgaagggcctgacggcatagctaaaacgccggaatgggcagcaaaaatcaccagcatcccggcagaaaaaattatccagttggcacgagagatcggtagtgcaaaacctgcttatatttgtcagggttgggggccacaacgacattccaacggcgagcaaacatcccgcgctattgccatgctttccgttctcaccggcaacgtcggcataaacggcggcaacagtggcgtacgcgaaggtagctgggatctgggggtagaatggttcccgatgctcgagaatcctgttaaaacgcagatttccgtctttacatggacagatgccatcgaccatggtacggaaatgaccgcgacccgtgatggtgttcgtggaaaagaaaaactggatgtccccatcaagtttttatggtgctacgccagtaacacattgatcaatcaacatggcgacatcaatcacacccatgaggtgcttcaggatgacagcaagtgcgagatgattgttggcattgaccacttcatgacggccagcgctaagtattgcgatatcctgttgcccgacctgatgccaacagagcaagaagaccttatctctcatgaatctgcagggaatatgggctatgtgatcctcgcccaacccgcaaccagtgcaaaatttgaacgcaaacccatctactggatgctgagtgaagtcgccaaacgcttaggaccagacgtttatcaaacctttactgaaggtcgcagtcagcatgaatggatcaaatatctccatgcgaaaacgaaggaacgtaaccctgagatgcccgactacgaggagatgaaaacgaccgggatctttaagaaaaaatgcccggaagaacactacgtcgctttccgcgcattccgtgaagatccacaggcaaacccgttgaaaacacctagcgggaaaatcgaaatttattctgaacgactggcgaagattgcagatacctgggaattgaaaaaagatgaaattattcatccccttcctgcgtataccccaggttttgatggctgggacgatcccctgcggaaaacctatccactgcagttaacgggcttccattacaaagcgcgtacccactccagctacggcaatattgatgtgttacagcaggcctgcccacaagaggtgtggatcaaccccattgatgctcaggcacgcggtatccgtcatggcgataccgtgcgggtatttaacaataatggagaaatgctgattgccgcaaaagtgactccgcgtattctgcctggcgttaccgccatcgggcaaggtgcgtggcttaaagcggatatgtttggtgaccgggtcgatcacggcggcagtatcaatattctgacctctcaccgccctagtccgctggcaaagggaaacccgagccacagcaatcttgtccagatcgaaaaggtttaaggagtagcccatgaccacacaatatggattttttatcgattccagccgctgtactggctgtaaaacctgcgaactggcgtgcaaagattttaaagatcttggcccggaagtcagtttccgccgtatttatgaatacgctggcggcgactggcaggaagataatggcgtctggcaccagaacgtgttcgcttattatctctccatctcctgtaaccattgcgatgaccccgcatgtacaaaagtctgccccagcggcgcaatgcataagcgtgaagatggctttgtggtggttgatgaagatgtttgtatcggctgccgctactgccacatggcttgtccgtacggcgcgccacagtacaatgctgaaaaagggcacatgacgaagtgcgatggttgttatagccgcgtcgccgaggggaaacaacccatatgtgtcgaatcctgcccgctgcgtgcacttgagttcggtccaattgaagagctgcgccagaagcacggcactcttgctgccgtcgcgccactgccgcgcgcgcatttcacaaaacccaatatcgttatcaaacctaacgccaacagccgcccgaccggcgataccactggttatctggctaatccggaggaagtgtaaaatgggaaatggatggcatgagtggccactggttatctttaccgtattgggtcaatgcgtagtaggcgcgctgattgttagcggaattggctggttcgccgccaaaaatgacgcagaccgtcagcgtattgtccgtggcatgtttttcctctggctgttgatgggcgtcgggtttattgcctctgtcatgcacctgggaagcccactgcgggcgtttaactccctgaatcgaatcggagcttctggtctgagtaacgagattgctgccggttccatattttttgccgttggcggattatggtggctggtggcagtcatcggtaaaatgccgcaagcgttggggaaactctggttacttttcagcatggcgctcggcgtcattttcgtctggatgatgacctgcgtgtatcaaatcgacaccgtgccaacctggcataacggttacactacgctggctttcttcctgacggtattgttgagcggtccaatacttgctgccgcaattctgcgggcagctcgcgttacatttaataccacaccatttgccatcattagcgttctggcgctgatcgcttgtgccggggtgattgtgctgcaaggtttgtctctggcgtctattcacagttccgtgcaacaagccagcgcactggtaccagattacgcctccttacaggtctggcgtgtggtattgttatgcgcaggtcttggatgctggctttgcccgctcattcgtcgccgtgaacctcacgttgccggacttattctggggctaatcctcatacttggcggtgagatgatcgggcgtgtgctcttttatggcctgcacatgacagtaggaatggctattgcaggttaacaaattggtgcggggcaacccgcacatttcaggatgttaggaatgacccattttagtcagcaagataatttttctgtcgcggcgcgcgtgttgggcgcgctgttttattacgctccagagagtgcggaagccgcacctctggttgcggtactcaccagtgacggctgggaaactcagtggcctctaccagaagcgagtttagcgccgctggtgacggcttttcagacacagtgtgaagagactcacgcccaggcctggcagcgtttgtttgtcggcccgtgggcactgccgtctccgccgtgggggagcgtctggctggatcgcgaatctgtgctgtttggcgatagtacattggcacttcgtcagtggatgcgcgagaaaggcattcagtttgaaatgaagcaaaacgaaccggaagatcattttggtagtctgctgttgatggctgcgtggttggcggagaatggtcgccagacagaatgcgaagaattgctggcatggcacctttttccgtggagtacacgttttcttgatgtttttatcgaaaaagcagaacaccctttctaccgtgcactgggtgaactggctcgcttaacgctggcgcaatggcaaagtcaactgttaattcctgtcgcggttaaaccgctgtttcgataagatcaccgtaatattgccggatggtgacgattacgcgcaatccggcaataataggttacagtgtcacgtttttttatctcttaaagcacgcactgcttttgcggctggcctcttttgccgcaaaatagtcgcccgtgtttcattgcccatttctgctcatgcatcatctacacatctatccggatctgcgcactatgttccaccgtctgcttatcgcaacagtcgtcggtattctcgcggcctttgccgttgccgggtttcgtcatgcgatgctgctactggagtggttgttcctcaataatgactccggcagtctggtcaatgcagcgacaaacctttccccctggcgacggttgctaactccggcgctcggcggactggcggcgggtttgttgctgatgggctggcagaaatttacccaacaacgccctcatgcgccgaccgattatatggaagcgttgcaaaccgatggacagttcgattacgcagcaagcctggttaaaagccttgcctctctgctggtagtaaccagcggcagtgcaattggtcgcgaaggtgcgatgattcttttagctgcccttgccgcctcctgttttgcccaacgttttacgccacgccaggagtggaaattatggatcgcctgtggggccgcggcgggaatggctgcggcctatcgtgccccgcttgctggcagtttatttatagccgaagtgctgtttggcactatgatgttggcctctctcggcccggtgattatttccgccgtcgtggcattgctggttagcaatctgattaatcatagcgacgcgttactctacaacgtacaactcagtgtgacggttcaggctcgtgactatgcgctgattatcagtacaggtgtgctggcaggtctgtgcggaccactgttgttaacgttaatgaacgcctgtcatcgtggatttgtgagtctcaaacttgcgccgccctggcaactggcactaggcgggttgatcgtgggtctgctttccctgttcacacctgcagtgtggggcaacggctatagcaccgtacaatcctttttaaccgccccaccactgttaatgatcattgccgggatcttcctttgtaaactgtgtgccgtgctggcgagtagcggttccggcgcacccggtggggtctttacaccgacgctatttatcggtcttgccattggcatgttgtatggtcgtagcctgggattatggttccctgatggcgaagaaattacacttttactcggattgaccgggatggcgacactgttggcggcgaccacgcacgcgccgattatgagcacgttgatgatatgtgaaatgaccggggagtatcagctactccccggtttattgattgcctgcgtaattgcgagcgtaattagccggacgttacaccgtgactctatctaccgccagcacactgcgcagcatagctaagcggatgtattgccccagttcacgctgttcggcgcgcggcagataaggcagttcaccaatgagcggtgccggaagttttttacccagcacatcaatgatttccgcataatgcgccagtcctgggttgattcggttagccacccagccaatgagcggcagcccgtcgttggcgatcgcctgagctgttagcagtgcatggttaatgcaaccttcctgaataccgacaaccatcaacaccggcagttgttcctgcactacccattcagagagtggacgcaaatcattcatcagactgcgccagccgccagtcccttctaccacgacatgatcgactttttcggtcaggtttgccaggccgttactaatgagggtgtaattgattgggcaactgtgcgccacgctactttcttcttcgcttaacgcgataggattaactgcttcataaggcagttcgatggtactaacactctgcaacaccagggcatctttattacgcagcccttcgggtgtctctttgctccccttcgctacgggtttatatcccgcaaccgtttttccctgggaggctaacgcttgtagcaatgcgcgggaaaccaccgttttccctacagaagtgtctgtaccggtaataaagaaacgcttcagcatcactaactccaccgttatgcttcacaaatataaaccaggaaaataattaaccttgaaagtctaagttatgctttcctggcccaaattgagatagcgcaaattttggtagaacagttaaaaaatgttaaccctgcaacagacgaatcaacaaagaaccgttatacatcgcgtcttttaccagtgcagcgcctgccatcgtgccctggttagaaaactgagtactctcaacgctgatgtgctgactatacgcaggaagggcctgctgacggatgctgtcactgatgaccgggaagaggatatctgccgctttacttaacggactgccaatcagtattttttgtgggttaaataaattcaccatgatggcaagaatgcgcccgacatgcgcgcccaccccggtaatgatgtcttttgccagtagatcgccgcgcaatgccgcctgacacaaactgtccacggttaacggttgtccatgtaacatgctgctcatggattgattaagacgcagctgtgccagctcaagaatactgtccacgctggcgatggtttcgaggcagccgtgattcccgcaataacagcgtttcccatacgggtcgacctgtgtgtggcctatttccacgagactactgctgcctgcgtgtagcagatgaccatcggtaatgacgcccgcccccacgttgtgatcgataaccacctgaatcacatcgcgcgccccgcgactggcaccaaacaaggcctctgccatcgtccatgcgctgatatcatgctgaatataaaccggaacgccggtatgctgctccagcgcctcgccgagcggcatctcttttacatcctcgtagaacggcatgcgatgtacaataccattttccgtatcaataattcccggcaaggttatggcaatgctagttagacgctcaagttttttctggtggcggataaaaaactgatcgatatgggaaataatacgatccagcaatggcaagtcatcttttaacgccagttcctggctctcttccaccaccagtttgctgctcagatcgcgcagagcaaggaaaatctccccgcgactaatgcgcagagaaagatagtgccaggcttcagtttcaaccaccagccccaccgccggacggccacggttccccgcttctttgatttccagctcttgcaccaggtgtgcttcgagcatctcacggacaattttagtgatactggcaggagccagttgcgccagacgggaaagatcgatacggctgactggaccaagctgatcaatcaggcgataaaccgcgcccgcgttggtctgctttatttgatcaatgtgcccaggctggttttcagcaaccaccgcatactccctatattttcgcgctccgaaataatctgtaggctatggtgaagcacttcaatacgtgtcgtcaaatttttacttaggcatgtgattaacagcacatttttcgggctttttcgctgaaatttccctcacctgagagcattcagcagatgaatacgaaagttacgcgcagccggactttgttcatgatgtttcggccagaccaaccacatttcagaaaccgcatcctcttcagcaatcggcacccagcgcatttcgttgagctgaacacgtttaaaactcgcaggcaaaatactaacacccagaccggcggaaaccagaccgatgatggtcattgcctcgcccacctcctgagtgatgacgggcgtcaaatggtaacgtcgcatcagcccgagaatatcgtcatacagccctgtcccgacgtgcggatcaaaaaagacaaagggttctttcgccagttcagccagcgttacattcgggttatttgccaggggatgatcgtgcgggatcatcgccataagcggttcatggacgatgactgcgtgttcaaggctctccggtaacgctgtgttacgcagcaatcccatatccagcgttccttcaatgagcggagcgatttgctcgcgagtgttcatttcgcgggtttgtaaatggacatcaggataatcacggcgaaacaggcttaacgtatcggacaccgcccgaataaaaggagcgctgctagtaaaaccaatgcgcaactcccccgcttcaccctgatgcagcctttcagcgcgagcggcagcgtcatccaccatagacaggatttgccgactatctgcaagaaactgttttcctgctgccgtcagcaatacactgcgattggttcgtgccagcagtcgggcaccaatttgttgctccagcgcctgaatctgctgacttagcggcggttggctaatattcaggcgggcagcggcgcgcccgaaatgcagctcttccgcaacagcaacaaagtaacgcagatgacgaagttcaatattcatatttaaaacatcttatttgagattattaatatattagacagaacaattcgattttcctaccctatgtataagcctgatctacaggcatatttagcaaggatttcaagtgagccgtactacaactgttgatggcgctccggcaagcgacactgacaagcaaagcatttctcagccaaatcaatttattaaacgcggtacgccgcaatttatgcgcgtcaccctggcgctgttctctgccggactggcaacatttgcacttctctattgtgtgcagcctatccttccggtgcttagccaggagtttggcttaacccccgcgaacagtagtattagtctgtccatttccacggcgatgttggctattggtttgctgtttactggcccgctatccgatgccattggtcgcaaaccagtgatggtcacggcgctactgttggcctccatttgtacgttacttagcacaatgatgaccagctggcacggcattttgattatgcgcgccttgattgggcttagcttaagtggcgtggcagctgttggcatgacttatcttagcgaggaaatccatcccagtttcgtggcctttagtatggggttgtatatcagcggcaacagtattggcggcatgagcggacgcttaattagcggtgtcttcacggactttttcaactggcgaattgctctggcggcaatcggttgtttcgcgctggccagcgcgttgatgttctggaaaatcctccctgaaagtcgccattttcgcccgactagcctgcgccctaagacgttgtttatcaactttcgtctgcactggcgtgaccggggattaccgttattgttcgcagaaggctttttgctgatggggagcttcgtcacgctgtttaattacatcggctatcggttgatgctctccccctggcatgtcagtcaggccgtggttggcttattaagcctggcttatttgaccggtacatggagcagtcccaaagccggaaccatgaccacccgctatgggcgtggtccagtgatgttgtttagcacgggggttatgctgtttggtttactgatgaccttattcagcagcctgtggctgatctttgccggaatgttactcttcagtgcaggattcttcgcagcccacagtgtagccagcagctggatcggcccccgcgcaaaacgcgctaaaggccaggcctccagcctgtatctgttcagttactatctggggagcagtattgccgggacgctgggtggtgttttctggcataactatggctggaacggcgtcggcgcatttattgctctgatgctggtcattgctctgctggtcgggacgcgtttgcatcgtcgtctgcacgcctgaaaaataagtccggactgcggtaaatacccgtccggacttattgccagctcaaaccaacgttaatagccatcctaaaatagacgaagcgccagccaattcccgcagcgcgtctagcgtcatcaggattataagtacccaaataaacggattcattttgctgtgtgtcatttattactgatgcgcagttattctactgctttgtaagtagtaaaatagttaacccgatcaagactactattattggtagctaaatttcccttaagtcacaatacgttattatcaacgctgtaatttattcagcgtttgtacatatcgttacacgctgaaaccaaccactcacggaagtctgccattcccagggatatagttatttcaacggccccgcagtggggttaaatgaaaaaacaaattgagggtatgacaatgaaaaaagtattagctctggttgttgccgctgctatgggtctgtcttctgccgcctttgctgcagagactacgaccacacctgctccgactgcgacgaccaccaaagcagcgccggcgaaaactacacatcataaaaaacagcataaagcagcacctgcccagaaagcgcaggcggctaaaaagcatcataaaaatacgaaagctgaacagaaagcccctgaacaaaaagcgcaggcagcgaagaaacacgccaagaaacacagccatcagcaaccggcaaaacctgctgcacaacccgcagcgtaagttttcaacagtaatgctggcgcgccccctcgcgcctgaaaattacggtgctaagcgggtaacgtttagcaccgcctttagcggagggtagtatggtgggccgttatcgctttgagttcattctgatcatccttattttatgcgcactgattaccgcccgtttttatctttcctgattgtagttatctgattttactcccactttcatcccgtcccgtctatagtatttatgagggtttgcttttaataatcataattacccaccagagtgtgatatgcgtacaaccattgctgtagtgttgggtgcaattagtttgacgtctgcttttgtgtttgcagataaaccagacgttgccagaagcgcaaacgatgaggtcagcaccctgttttttggtcatgatgatcgtgtgccagtgaatgacacgacccaaagtccgtgggatgcggttgggcaactggaaacggccagcggcaatttatgtacggcgacgctgattgcacccaatctggcattaacggcaggacactgtttattgacacctccaaagggtaaagccgataaagcagtggcgctgcgttttgtgagtaataaaggtctttggcgctatgagatccacgacatagaaggccgcgttgatccgacactgggaaagcggttaaaagcagatggggatggttggattgtacctcccgcagccgcgccgtgggacttcggattgattgtgctacgtaatcccccttctggcattacgccgttgccgttatttgagggagataaagccgcgcttaccgccgcattaaaagcggcaggtcgtaaagtgactcaggcaggctaccctgaagatcatctcgatacgttgtacagtcatcaaaactgtgaagtgactggctgggcgcaaacgagcgtgatgagtcatcagtgcgataccttgccgggtgacagcggtagccctctgatgttgcataccgatgacggctggcaattaattggggtgcaaagtagcgctcctgccgcgaaagatcgctggcgcgccgataaccgggccatttctgttaccggttttcgcgacaagctggatcaactgagccaaaaataatgttcaaacgctgcccgacagcgcgggcagcgtcttcatcaggcaagtttcaccatgatcattccagccaacagcaagaccaggccaatccagcctttacgatttaaccgttgaccaaacaagatccaacctgcggctaacgtggcggcaataccaaacccgccccacaatgcataagcgacagacaagtcgatccctttaacggcttgagaaagcgcactaaaggcagccagcaccgccgccagggagagcaagccaaatattttgcgacgaaagccgtcagaaaatttcaaaaagacgttagcaacgatttccagcacgattgccaatgccagccaggcggcgtgaacccattcaaactgcgccatggttcacctccagttcaggtttacgcgctttacgggtaccactttttatcaacacaatcccggcgaccagggtggttaacccggcaattttcatcaggcttaaactttcgtcgaataacaaaacgctaaacaaggtaataaataaaataccgataccttcccacagcgcataagctacgcctaaggcgatttttttaacggcgaaagagagaaatatatagctcagagaaatcatcaccagcattaaaataaagccgccatttccctcactgacgctcgcccatttcatactcagcgtaccggtaatttctgtagcaatagccagacctaataaaatccaataaatatacattgtccttctcctgcaagagaattattttaattttcgcttaattcagcgaaaccaaagtaaagtggtcaagccccgcgcatagcgcaagctttggcagaagaaaggactaaagcgcgttgcgccagtgctgctcacctacgagcaagatagtggatgaggtacgaagatgggtaaatgtagaaaataacgtcctgaacaaattgtccataatattacaattatccgcagtgttgcttctcgtcatcgcggatgataattgtcctcggtagttgaacacgcctgatttgtatcatagcttaagaattaactcaaaatattttcacttctttacctgagcggtttgattttcgttatgatgacggagcgaaaaagacattattattagcaaaggaagaaaaaacggggacaagcatggcaaagccgatcatcacgctcaatggcctaaaaatcgtcattatgttgggaatgctggtcattattctctgcggtatccgttttgccgccgagatcatcgtgccgtttattctcgcattatttattgctgttattcttaacccgctggtgcaacacatggtccgctggcgtgtgccgcgtgtactggcggtgagcattttgatgaccatcatcgtgatggcgatggtgttgctattagcttatctgggttccgcgctcaacgagttgacgcggacgttaccgcaatatcgcaactctattatgacgccgctgcaagcgcttgaaccgttgttgcaacgcgtagggattgacgtcagtgttgaccagctggcgcattatattgatccgaacgcggcgatgacgttgctcaccaacttattgacgcagttatctaatgccatgagtagtatatttttattgctgctgacggtgctgtttatgctgctcgaagtgccacaattgcccggaaaatttcagcaaatgatggcgcgtccggttgaagggatggcggcgattcaacgtgcgattgacagtgtttctcattatctggtgctgaaaacagccatcagcatcatcaccggcctggtcgcctgggcgatgctcgccgcactcgatgttcgcttcgcttttgtctggggattgctggcctttgcgcttaattacatcccgaatattggtagtgtcctcgcggcaatcccccctatcgctcaggtactggtgtttaatggcttctacgaagcgttgctggtgctggcgggatatctgctgattaatctggtcttcggcaatattctggagccgcgtatcatggggcgtgggctggggctttccacattggtggtatttttgagcttgattttttggggatggttgttaggaccggtgggtatgctgctttccgtgccgttgacaattattgtcaaaattgcgcttgaacaaacagcgggaggtcaaagcatcgccgttctgttaagcgatctcaataaagagtgacggcctcagcagaggccgtcagggttacagagctttcaggattgcatccacgctggctttggcgtcaccaaacagcatgtgggtgttttccttgaagaacagcgggttttgcacaccagcatagccagtgttcatgctacgtttaaagacaatcacgttctgcgctttccacacttccagcacaggcataccagcaatcggactcttcggatcatcctgcgccgccgggttaaccgtatcgttagcaccaatcaccagtacggtatcggtatcagcaaagtcatcattgatctcgtccatttccagcacgatgtcatacggtacttttgcttcagccagcaatacgttcatatgtccaggcaaacgccccgcgaccgggtggataccgaaacgcacattaataccacgagcgcgcaatttctcagtaatttcagcgacaggatattgcgcctgcgcgactgccatgccgtaccccggagtaatgatcacactatgggagtttttcagcagttccgctgtctcttctgcggtgatttcgcggtgctcacccacttcctgatcatcgccagtagaagagccgtcggtgccgaaaccacccgcaataacgctgataaaggaacggttcatcgccttacacataatgtaagaaaggatagccccgctagaaccgaccagcgcaccggtcacaatcagcaggtcgttgctgagcataaagcccgcagccgcagccgcccagccggagtagctgttcagcatgctcaccaccactggcatatctgcaccaccgatggaggcgactaaatgccagccgaataccagcgcaattgcggtcattatcagcaatgccagcacttgcaggccgacgctgtccgtgcgaacaaatacaatcagcagcaggaaggaaacgaccagagccgccaggttcattttgtgacggtttggcagcatcaatggtttagagctaatcttgccacacagtttgccgaacgccaccacgctacccgtgaacgttaccgccccgatgaagataccgaggaacacttccgtcaggtgaatattgaccagaatcggtgccattcccgcgtcatgatgcagatagctgttaaagccaaccagcactgccgccagacccacgaagctatgcaggatcgccaccagttctggcatttcggtcatttcaactttcttcgccagacggataccaattgccccaccaatgaccatcgccagcaagatccagccaacattacccgtatccggtccaaaaatggttgcgattaacgcaatcgccatcccggcgataccgaagttgttaccctggcgagacgtttcatgtttgctaagaccggccagactgaagataaacaggatcgcggcaacaatgtatgcagctgtaactaatcctccagacatatgttaccccttaatttttgcggaacattttcagcatgcgctgagtcacggtgaagccaccgaaaatattaatgctggctataagcaccgcgataaaactaaggaagctaacccagccgccctggccaatctgcaacagtgctccgacaacaataatcccactaatcgcgttggtgacgctcatcaacggtgtatgcagcgcgtggcttacattccacaccacgtaataaccgacaacgcaggccagcgcgaaaacggtgaagtgcccaaggaattctttcggcgcaacgcttgccatccagccaaaaagaatgattgccagcgccatcaacgcgtatttacgccacggactgcaggtacatttttcctcagttttcacttccggtgccgctttttgtgccgcctgcggctgagcacttacctgaatcggcggtgccggccaggtaatttcgcccgcacggatcacggtcacgccgcgaatcaccacatcatcaaaatcaacagtgatattgccgtctttctctttgcacaacagtttcagcagattaacgaggtttgtgccgtaaagctgactggattgcgtcggcagacggcccggaagatcggtataaccaatcactttgacaccattttccgtagtgaagatttcacccggcacggtgtattcacagttgccgccgttttgggctgccaggtcgacaatcacactgcccgccttcatggagtcaaccatttcacgggtaattagcttcggcgctggtttgcctggaataagcgcggtggtgacaatgatatcgacctcttttgcctgggcggcaaagagttccatttccgctttgatgaacgcgtcgctcatcactttggcatagccatcgccgctgccagcttcctctttaaaatccagctcgaggaattccgcgcccatactttgaacttgttctttcacttccgggcgggtgtcgaatgcacgcacaatcgcgccgagactgtttgctgcgccaatggcggccagacctgcaacacccgcaccaatcaccatcacttttgccggtggcactttcccggccgcagtaatttgcccggtaaagaagcgcccaaattcatgtgccgcttcaacaatggcgcgataaccggcgatgttcgccatgctgcttagtgcgtccaggctttgtgcgcgactgatacgcggcacagagtccatcgccatcacggtcacgttacgttccgcaagtttttgcattaattccggattctgcgcaggccagataaaactcaccagcgttgtcccaggattcagtaacgcaatttcatcatctaacggcgcattgaccttcagaatgatctcactctgccagacgctattcccttctacaatttcagcgcccgcttgcacaaacgctttatcgtcaaaacttgccagttgacccgcgccgctctctaccgcgacggtaaaacccagtttcagcagctgttccactgtttttggcgttgctgcaacacgggtttcattggttaaccgttctcttggtatgccaattcgcatgatattcccttccatcggttttattgatgatggtttgcctgtgtcaggagccacacaagctgctcatgtacgagctaaatgttactccgttaaaataaattagtaacaaacgccctataacgtactgaaaattatgcctgtgatctagcgccaaaaatcagtatttcggcgtgaactcgcaaaatattaacgattcagccgtgatagtgggataaacaccttagaacgccggataaagactgataattgtcttcgacggtcgggtaaaacgagacatcgccccggcacgaatcactacttaacattaaattaacttatacaattcagttgcttcagtagtaatgatgctgatacggctgttttttaagcatagacggtcatttgagcaggattaaaattggcttaaggaatgtgatatgaaaaatgacgcagacagttacaccgtttaaatgcaataatcagccacgtttctcgttaataacaataccagtacctggtttgcgcaaggcgaaggattatttttatgaagcttaagaacaccctcctggcgagcgcactgctttctgctatggcattctccgttaacgcagcaacagaactgacaccggagcaagcggcagcggttaaaccttttgaccgtatagtggttaccggtcgttttaatgctattggcgaagcggtgaaagccgtttctcgtcgcgcagataaagaaggtgccgcctctttttatgttgtcgacacttctgattttggtaacagcggtaactggcgtgtggtcgctgacctctataaagccgatgctgaaaaagcagaagaaacaagtaatcgcgtaattaacggtgttgtcgaactgccgaaagatcaggctgttctgattgaaccgtttgacacggtcaccgtccagggcttctatcgtagccagccagaagtcaatgatgccatcaccaaagcggcaaaagcgaaaggtgcctactctttctacatcgttcgtcaaatcgatgccaaccagggcggcaaccagcgtattactgcattcatctataaaaaagatgctaagaaacgtatcgtccagagcccggatgtgatcccggcagattccgaagcaggacgtgcagctctggctgccggtggcgaagccgcgaagaaagttgagatcccgggtgttgcgactaccgcaagtccaagttctgaagtcggtcgcttctttgaaacccagagtagtaaaggcgggcgttacaccgtcacgctcccggatggcactaaagtcgaagaactgaacaaagcgaccgcagcgatgatggtcccgttcgacagcatcaaattctctggcaactacggcaacatgaccgaagtctcctatcaggttgcgaaacgtgccgcgaagaaaggtgctaagtattaccacatcacccgccagtggcaggaacgtggtaataacctgaccgtcagcgcagatctgtataaataactattcagttactcctataaggcggcttgatgccgcctttcgcatttttagtcacaaatttccccgcgaccattgcatgcagacacatctcttcgtaaaatcccgcgcttcagtggcaaactccatttttatgcgttttgccctaatatttattcttcttatcacgttttaatcactggatatcgatggaaaagaaactgggactgagcgcactcaccgcgctggtattaagcagtatgctgggcgcgggtgttttcagtctgccgcaaaatatggcggcagttgccagcccggcagcactgctcatcggctggggtattactggcgctggcattttattgctggcctttgccatgctgatcctcacgcgcattcgtcccgaacttgacggcggtatctttacctatgcccgcgaagggtttggcgagctaatcggcttttgttccgcatggggatactggctgtgcgcagtcatcgccaacgtctcctatctggtgatcgttttttccgcgttaagcttttttacggacacgccggaattgcgcctgtttggcgatggtaatacctggcaaagcatagtcggtgcaagcgctttattgtggattgttcactttttgatcctgcgcggggtgcaaaccgctgccagcattaacctggtggcgacactggcaaaattgttgccgctgggtctgtttgttgtgctggcgatgatgatgttcaaactggataccttcaagctcgacttcaccggacttgcacttggcgtacccgtttgggaacaggtgaaaaacaccatgctgatcaccctgtgggttttcattggtgtggaaggtgccgtggttgtttctgcgcgtgcgcgtaataaacgtgatgttggcaaagcgacactgctggcggttctctccgctctgggcgtttacttgctggtaacgctgcttagcctgggtgtggtggcacgtcctgaactggctgaaattcgtaacccgagtatggccggtctgatggtggaaatgatgggaccatggggcgaaatcatcatcgctgccggtttgatcgtttccgtttgcggcgcgtacttaagctggaccatcatggcagcagaagtaccgttcctggccgccactcataaagcattcccgcgcatttttgcgcgccagaacgcacaagctgcgccatccgccagtctgtggttgaccaacatctgcgtgcaaatttgtctggtactcatctggctgaccggttccgattacaacacgttgctgaccatcgccagtgaaatgattctggtgccctatttcctggtcggcgcgttcttgctgaaaatcgcaacccgtccactgcataaagcggtaggtgtcggtgcctgcatttatggcttatggttattgtacgcctctggtccaatgcacttgctgttatccgttgttctgtatgcaccggggctgctggttttcctgtacgcgcgcaaaacgcatacccatgataatgtactgaaccgtcaggaaatggtgctgattggcatgctgttaattgccagtgttccggcgacctggatgctggtgggataacgttcatcccatcgttggatagcaaaggagataacgatgggtaaaacccagcccttgccaatattaattactggcggaggtcgtcgcatcggcctcgccctcgcatggcatttcattaatcaaaagcaaccggtgattgtcagctatcggacacactatccagccattgatggactgattaatgcaggtgcgcagtgtattcaggctgattttagcaccaacgacggtgtgatggcgtttgccgatgaagtactaaaaagcacccatggtctgcgtgctattttgcataacgccagtgcgtggatggcggaaaaaccgggtgcgccactggccgacgtactggcttgcatgatgcagatccacgttaataccccatacctgctcaaccatgcgctggaaagattactgcgtgggcacggacacgccgccagcgatatcattcactttaccgattatgtggtggagcgcggtagcgacaaacatattgcgtatgctgcaagcaaagcggcactggataatatgacccgcagctttgcccgcaagctggcaccggaagtgaaagtgaattctattgcgccaagcctgatcctgtttaatgaacatgatgatgccgaatatcgacaacaggcgctgaataaaagtctgatgaaaaccgcgcctggcgagaaagaagtgatcgacctggtcgattacttacttaccagttgctttgtcaccggacgcagtttcccacttgatggcggtcgtcatctgcgttaatgcagctttatccagcatataatcaacacccatgcgcttatcccccaacacgcaacagaaccaacaaaagcggcgggcaagcgcatcattccggtgaaataccacaggctcaccaggtaaacaaaatagggaataatgctccacatactaaaaatgatggttgcgcgtaaggcttcaatgccgcgttcgctggcaacaatataatgcgcgataagcgcaaaggtcgggaaaagtggaatcagcccggcgatataataatttttcgtttttgctaaaacaccaatcaacagcactaccagcgcaccgagcgcggctttgattaccagccccatctttttaccttaacacttccataacaagtcatcagtagaatacctgatgaaaacttgtttagaaacgattgatagtaagtaaaaacagcgcggtgtattgtgacgtttttatatctaccgtgaatgttatgaacactatcgtatttgtggaagatgatgcggaagtcggtagtctgattgccgcgtacctggcaaaacatgatatgcaggttaccgtagagccgcgcggcgaccaggccgaagaaaccattttgcgagaaaatccggatttggtgttactcgacatcatgctaccaggcaaggacggcatgaccatttgtcgtgatttacgcgcaaagtggtctggaccgattgttcttctaacctctctcgatagcgatatgaaccacatcctggcactggaaatgggtgcctgcgactatattctcaaaacgacgccccctgctgttttgctagcgcgtttacgtttgcatttgcgtcagaatgagcaagccacactgaccaaaggtcttcaggaaacgtctctgactccctacaaagccctgcatttcggcacgttgaccatcgatcccatcaaccgcgtagtcaccctggctaacactgaaatcagcctcagcacagctgatttcgaattattgtgggaattagctacccatgccgggcaaatcatggaccgcgatgcattgctgaaaaatttacgcggcgtcagttatgacggactggatcgtagcgtggacgtggctattagccggttaagaaaaaaactgctcgataacgccgcagaaccttatcgcattaaaactgtgcgtaacaaaggctatctttttgcgcctcatgcatgggaataagcgatgaaaaaactgtttatccagttttacctgttattgtttgtctgcttccttgtgatgtctctgctggttgggctggtgtacaaatttaccgccgaacgcgcgggcaaacagagcctggatgatttgatgaacagtagcctgtatctgatgcgcagcgaattgcgtgagatccccccacacgactggggtaaaactctgaaagagatggatttaaatctctctttcgatctgcgtgtcgagccactgagtaaataccatcttgatgatatttccatgcaccgactgcgtggcggcgaaattgtcgccctggacgatcagtacacgtttttgcagcgtatcccgcgcagccactacgtgctggcagttggtcctgttccttatctttattatctccatcagatgcgattgctggatatcgccctgatcgcttttattgctatttccctcgcctttccggtgtttatctggatgcgtccgcactggcaggatatgttaaaactggaagcagcggcgcaacgatttggcgatgggcatctcaatgaacgtatccactttgatgagggtagcagctttgaacgacttggcgtcgcatttaaccagatggcggacaatatcaacgccttaattgccagcaaaaaacagcttattgacggtatcgctcacgaactgcgaacaccgttagtgcgcctgcgttatcgactggagatgagcgataacctgagcgccgccgaatcccaggcgttgaatcgtgatatcagtcaacttgaagctttaattgaagagctgctgacttatgcccgactcgatcgcccacaaaacgagcttcatcttagcgaaccagacctgccgttgtggctgagtacgcatctggcagatattcaggcagtaacgcccgataaaacggtacggataaaaacgctcgtgcaaggccattatgcggcgttggatatgcgcttaatggagcgcgtgctggataatttgctcaataacgccctgcggtactgccatagtacggttgaaaccagcctgctactgagcgggaatagagcgacattaattgttgaggatgatggcccagggattgccccagaaaaccgcgaacatatctttgaaccttttgttcgcctcgatcccagccgggatcgcagtaccggcggctgcgggctggggctggcaattgtccactctatagcactggcaatgggcggtacggttaattgtgacaccagcgaactgggtggtgcccgcttcagctttagctggccgttatggcataacatcccgcaatttacctctgcctgacactacgcgcacgatggtcaagtcaccacgactgtgctataaaataagtatgttgtaactaaagtggttaatattatggcgcgttacgatctcgtagaccgactcaacactacctttcgccagatggaacaagagctggccatatttgccgctcatcttgagcaacacaagctattggttgcccgcgtgttctctttgccggaggtaaaaaaagaggatgagcataatccgcttaatcgtattgaggtaaaacaacatctcggcaacgacgcgcagagcctggcgttgcgtcatttccgccatttatttattcaacaacagtccgaaaatcgcagcagcaaggccgctgtccgtctgcctggcgtgttgtgttaccaggtcgataaccttagccaagcagcgttggtcagtcatattcagcacatcaataaactcaagaccacgttcgagcatatcgtcacggttgaaagtgaactccccaccgcggcacgttttgaatgggtgcatcgtcatttgccggggctgatcacccttaatgcttaccgcacgctcaccgttctgcacgaccccgccactttacgctttggttgggctaataaacatatcattaagaatttacatcgtgatgaagtcctggcacagctggaaaaaagcctgaaaagtccacgcagtgtcgcaccgtggacgcgcgaggagtggcaaagaaaactggagcgagagtatcaggatatcgctgccctgccacagaacgcgaagttaaaaatcaaacgtccggtgaaggtgcagccgattgcccgcgtctggtacaaaggagatcaaaaacaagtccaacacgcctgccctacaccactgattgcactgattaatcgggataatggcgcgggcgtgccggacgttggtgagttgttaaattacgatgccgacaatgtgcagcaccgttataaacctcaggcgcagccgcttcgtttgatcattccacggctgcacctgtatgttgcagattaacgcccggctttcatactgccgaccatctgttctggccgtacccagctgtcaaactcggcttcgctaagataccccagcgcaagggccgcagcttttaaggtcagcccttctttatgcgcttttttggcgatctcggcggctttgtcataaccaatgtgggtgttaagcgcagtcaccagcatcaggctttcattgagtaattgattgattcgctcacgattcggttcaatacccactgcgcagtgtttgttaaaactttccatgccatctgccagcaagcgcacgctttgcaggaaattgtggatcaccattggacggaagacgttcagttcaaagttaccggaagcgccccccatgttgatcgccacgtcgttccccatcacctgacagcagagcatggttaatgcctcacactgtgttgggttcactttccccggcatgatactgctgcccggctcattttccgggatactgatttcaccaattccgcagcgcgggccagaggccagccagcggacatcattggcgattttcatcagactcgcagccaaccctttcaacgcgccgtgcgcctgaaccagggcatcacaggtcgccagcgcttcaaatttgttcggcgcggtaacaaacggtgcacaggtaatgactgccagttcatctgctacgcgacgcgcatactccggatgggtatttagtccagtacccaccgctgtaccgccaagagccagttccgctacgtgaggcaggctgtattcgatatgtttgagattatgctcgagcatcgctacccagccggaaatctcctgccccagcgttaacggcgtggcatcctgcaagtgagtacgaccaattttgacgatatcggcaaaagcacgggatttctcattcagtgtctgtgtcagggttttaagctgaggaatgagttgcttgcgcagcgccagcagcgccgcaacgtgcatcgccgtcggaaagacatcgttggaactttggcttttgttcacgtcgtcgttagggtgaactttacgttccatcccgcgcacaccgccgagtaattcactggcccggttagccagcacttcgttcatgttcatgttactttgcgtgccggagccggtctgccagatagccagcgggaattcgtcgtcatgctgtcctgccagtacttcatccgccgcctgacgaatggcgctcgctttctcttcagacaacaagcctaaatcttcattaacttttgccgctgcacgcttggttagcgccagcgcatgaatcagactggtgggcattttctccgtgctaatgcggaaatgctccaggctgcgttgagtttgtgcgccccacagcttatctgccgggacatcaatcgcccccatgctatctttttcgctgcgtactgtattcatgacctgctcctcacctgattaattttttctttctgttttgctttcgttaagcaacttttagctcacttattatttaccatttgataacaaatgtttggtctttcgtgccatgtaaaaaaaccgccccgaagggcggctctgtttatttcacacagcgggtgcattgtgtgagttgtatctgctggaagaagtcatttcctttatcatccacaaggataaacgccgggaaatcttccacttcaattttccagatggcttccattcccagttccggatattcaacacattccaggctcttaatacttccctgcgccaatacagcggccggaccaccgatactgccaaggtagaagccgccgtgttttttacaggcatccgtcacctgctggctgcggttgcctttcgccagcatgatcatacttccgccctgcgcttgcagttgatcgacataagaatccatccgtccggcggtcgttgggccaagagaaccggaggcataaccttccggcgttttggccggacccgcgtagtaaatcggatgatctttgatgtactgcggcagcccttcaccgttatccatccgctctttcagtttggcgtgagcaatatcacgaccgacgataatcgtgccgttaaggcttaagcgtgtagaaacgggatactggctcaactgtgcgaggatctctttcatcggacggttaaggtcaacgcgcaccgcttcgccttctcccgctttgcgcagctcttccgggatatatttgcctggattatgttccagtttttcgatccagatcccctgacggttgatcttcgctttgatattacggtcagcagagcaggagacgcccataccgaccgggcaggatgcgccgtgacgtggcaggcgaatcacgcggatgtcgtgagcgaagtatttaccaccaaactgcgcacccagaccaagattttgcgcttcgatcagcaattctttttccagttccacatcgcggaacgcctgaccgtgctcattcccttccgttggcagttcatcatagtatttcgcggaagccagtttcaccgttttaaggttcgtttctgcagaagttccaccaataacgaacgcaatatgatacggaggacaggccgccgtacccagcgtgcgcatcttctcaaccaggtaatttttcagtttccccggcgtcagtaacgctttggtttcctgatagagatacgtcttgtttgcgctaccaccacctttggcgatacagaggaatttgtattcgtcgccatcaacggcataaagatcgatctgcgctggcagattggtgccggtattcacttctttatacatatccagcggcgcgttttggctgtagcgcagattatcttcgatataagtgttatagacaccgcgcgccagcgccgcttcatcaccaccaccggtccatacacgctgcccttttttaccaacaataatcgcggtgccggtatcctgacaggttggcagaacgcctttcgccgcgatgtcggagttacgcaggaattgcagcgccacatatttatcattttcgctggcctccgggtcacgcagaatgtcggccacctgttgttggtgcgccggacgcagcatgaagctcgcatcatgaaacgcctggcgcgccaacagagttaacgcttcgggtgcgactttcaaaatctcctgcccttcaaattcagatacgctaacgtgttcgctggttagcaggtaatactcagtatcatcttttttgagtggaaaaggagcctgataatgaaagggtttgttactcattgttctctcacttactgcctggtttggttatgctctgggcgggtgttccgttgccctgttaaaagcgagtaacaatatcctacacacttttttaacaaaaactgagactagtacgactttttgcggctccaggttacttcccgtaggattcttgctttaatagtgggattaatttccacattaaaacagggattgatcatgcaaaaactcattaacagtgtgcaaaactatgcctggggcagcaaaacggcgttgactgaactttatggtatggaaaatccgtccagccagccgatggccgagctgtggatgggcgcacatccgaaaagcagtagtcgagtgcagaatgccgccggagatatcgttagtctgcgtgatgtgattgagagtgataaaagcactctgctcggagaggccgttgccaaacgctttggcgaactgcctttcctgttcaaagtattatgcgcagcacagccactctccattcaggttcatccaaacaaacacaattctgaaatcggttttgccaaagaaaatgccgcaggtatcccgatggatgccgccgagcgtaactataaagatcctaaccacaagccggagctggtttttgcgctgacgcctttccttgcgatgaacgcgtttcgtgaattttccgagattgtctccctactccagccggtcgcaggtgcacatccggcgattgctcactttttacaacagcctgatgccgaacgtttaagcgaactgttcgccagcctgttgaatatgcagggtgaagaaaaatcccgcgcgctggcgattttaaaaagcgccctcgatagccagcagggtgaaccgtggcaaacgattcgtttaatttctgaattttacccggaagacagcggtctgttctccccgctattgctgaatgtggtgaaattgaaccctggcgaagcgatgttcctgttcgctgaaacaccgcacgcttacctgcaaggcgtggcgctggaagtgatggcaaactccgataacgtgctgcgtgcgggtctgacgcctaaatacattgatattccggaactggttgccaatgtgaaattcgaagccaaaccggctaaccagttgttgacccagccggtgaaacaaggtgcagaactggacttcccgattccagtggatgattttgccttcagcctgcatgaccttagtgataaagaaaccaccattagccagcagagtgccgccattttgttctgcgtcgaaggcgatgcaacgttgtggaaaggttctcagcagttacagcttaaaccgggtgaaagtgcgtttattgccgccaacgaaagtccggtgactgtcaaaggccacggccgtttagcgcgtgtttacaacaagctgtaagagcttactgaaaaaattaacatctcttgctaagcttattaaaggcttataacaccttcaggcggccagtccgcctgatttcattttatggataatcattatgaataaaagcctggtagcggtaggcgtcattgttgcgctaggcgtagtctggacaggcggcgcatggtatacaggcaagaagattgaaacccatctcgaagacatggtcgcgcaggcgaacgcgcaactcaaactgacagctcctgaatccaacctggaagtgagttatcaaaactatcatcgcggcgtattcagcagccagttgcaactgttggtgaaacccattgccgggaaagaaaatccgtggattaaaagcggtcagagcgtcatcttcaacgaaagcgttgatcatggtcccttcccgcttgcccagcttaaaaaactgaacctgatcccgagcatggcaagtattcaaaccacgctggttaataacgaagtaagcaaaccactgtttgatatggcaaaaggtgaaacgccttttgagattaacagccgcattggttacagcggtgattccagttccgatattagcctcaagccactgaattacgagcaaaaggatgaaaaagtcgcctttagcggcggcgagttccagttaaatgctgacagagacggcaaagccatctccctttccggggaggcgcaaagtggtcggatagacgcagttaacgaatacaaccagaaagtgcagttgacctttaataatctgaaaaccgacggttccagcacgctggcaagttttggtgagcgtgtaggaaatcaaaaactgagtctggaaaaaatgaccattagtgtggaaggcaaagaactggcactgctggaaggcatggagatcagcggtaaaagcgatctggtcaatgacggtaaaacgatcaatagccaactggattacagcctaaacagcctgaaggtacagaatcaggatctgggcagcggcaagctgactttaaaagtcggccagattgatggtgaagcctggcatcagtttagccagcaatataacgcgcaaactcaggcgctgctggcacagccagaaattgccaacaaccccgaactttatcaggagaaagtgacggaagccttctttagcgccctgccgctgatgctgaaaggcgatccggtgattactatcgcgccgctaagctggaaaaacagtcagggtgaaagtgccctgaatctgagcctgttcctgaaagatccggcaacgactaaagaagcgccgcaaacgctggcgcaggaagtagatcgtagcgttaaatctctggatgcgaaactgaccattccggtggatatggcaactgagtttatgactcaggtagcgaagctggaaggttatcaggaagatcaagcgaaaaaactggcgaaacagcaagttgaaggtgcaagtgcaatggggcagatgttccgtctgaccaccttgcaggacaataccatcaccaccagcctgcaatatgctaacggtcagataacgttaaatgggcagaaaatgagcttagaagattttgttggcatgtttgcgatgccagctcttaacgttccggctgtaccggcaattccgcagcagtaattcacggccaaaacgccggagaattttcactccggcgttttcatctgaaaacaaaccagagattgcctgatgcgctacgcttatcaggcctaccttttcctgcaacactttgaatttatgagtttttgtaggctggataaggcgtttacgccgcatccggcataaaaaacgcgcactttgtcaacaatctgaaacgccggagatttttctctccggcgttattttttacttcagcataaagtcatactgaatactcattttcacatcccagtaattcaggcgatcgcccagcgtactgccatcgcgcttttcccgccctttatcggcagcaagaaagaaattcatcccttgtaacggcccttcgctgacccgatagttcataccacctaagatacccgtgccttcaatccgcacatctcgtttactggattcatagccgcgagtcacaatcggtgcaaatgtcagcgtaaattgcggcgttaaacgatagttgacgcccaattgccaggactgcattccttcacggttacgatcaagacttaaactaaagggatagccaatgtcggtatccaccacggcaccattcattgcatggcgcaaataaccaccactgccaaatacacttccccacggcgcattccaggtcaattgtccactaaccaacgccgtttcattgggctggctggtattacgacttaaaccttcgagctgcgcgtaaaagccgagcaactcccctttcaacgtataattcgggtcgagcggtatgcttttctcgagaatactttgtatctgattggaaacatctttctgtacgcttgcccccagagaatagcgactggtatcatcatgccaactggcggctaaaaaagaacgtgcgcgatgtttatcgtattttcccgtctggctgttatacaccccttcatcacgaataccggttgtactatcagtccataaaaatactcgactacgccacattccccacagatcaatatttggtgttaaagcccaataacctaatgctccttcagaaactgtcggtaatgtacgttggctactgccagccattaacggaatacgataaggtaagctaccataactataatccgtcccgaagcgacctaatttaagcaggctattttcactgggttttatttttactgcccccagggcaaagccaaaacttttatcaccatcaagataccaccgggtactcatatcagcacgagcacctaatttataaacataatacgccccgccttcaacgccaataatattggaataataaccactattgaaatcgagcaatcctccctgtacccatgcgtaaatatctcttcccgcgccagcactgggcttatccgccctgcgcaattcgtttttcagtctgatgcgtagtcccgcttcatcgtcagccagttgcgccgcataagcagaggtaaggccagaggcagccgtcaggcaaataacggccatggccactatttttctcatagttgcacctttgatgttctgattatttttattgaatattaattagtgatatcgctgattaattgctgctgcacttttttacgattatcaatttcaaccacgatttctttgaattttttatccgtgagcggataaaaccagataataacgaatgccagtagcataaatccgcaaggtactaaggcaatacttgtgcggatgcccataataacttccggcgtttgcacctgattggcgatatatccgcttaaccccaaaataaaggcaggaatactacctccgattgcctgaccgcatttacgggtaaaactgaatagactataggtgagcccttcaattcgcacgccggtcaggtattcaccgtattctacggtatcagcttccagcgcccacatcacggtcatggtaacgccctgaccaatactagcgatggccaacgcaaccaacgccaccggcagactccagacggaaacccagaagaacagcagataaccgcaggttcccagcaaagcgccaatcaggaaggtattctttttaccgatcctcgcgaccatccccggcaccagcggtgcgcttgccacagtaccaaccaggttttgcaccagtaccagcacagtgaacagcccggtatcatttaacacatagcgcacgtagaacaagctgctggcgctgaccgcaaaggtgctaatcagcacacacagcgcaccgatgcacaacataaacagcgggcgattccgtttcagggtttgcagactgatattcaaactcggctgcgcaacgatacgtaccacattctcacgcgtgcttttgaagcagatgaagtaaagcaccattccggcaatcgccagcacaattgtccagaaatggtatacgctcaccatctcttccgggctggagttcttaatgctcggtcctatcagaaatgccaggcagacaaaggtcaaactagcggcaatcccacgagccgcgcccagacgggcgcgggattgtggttgttgggtcatcgcggtagcaagactaccataaggaatattcaccaggctgtagcaaagcccgaggcccatgtaggtcaaatatgcatacaccactttgctaccatggctccagtcggtcagcacccagaataccagcacgctgaagatcattaacggcgcagtaccgaagagtaaaaacgggcggaattttccccagcgggtattcacactgtccaccactcgtccggcaaagacgtcggcgaaggcatcgaatacccgcaccagtaacagcatggtgcccgccgcagcggcaccgacgccagcgacgtcggtgtagtaactcaacaggaagagcgcccccattgcgaaggcgaagttattggcgacgtcaccgaggctgtagccgacgatggtgcgccaggagagttgttgattcattgtttgcctccctgctgcggtttttcaccgaagttcatgccagtccagcgtttttgcagcagaaaagccgcgctcttcggtttgcggtcgcgagtgaagatccctttcttgttaccgccaacgcgcaatatgccttggctggtcgcaaaatcggcgaaattccatacctgttcaccgacgacggcgctgacgcgatcaaagacgcggtgatacatatccagccatgcacactgatactcttcactccacatgtcggtgtacatactgtgcagcccggctaacgtatccacgccgtattcggtgatgataatcggctgatgcagtttctcctgccaggccagaagttctttttccagtaccttctctgccgtttccaaatcgccgctttggacataccatccgtaataacggttcaggcacagcacatcaaagagatcgctgatggtatcggtgtgagcgtcgcagaacattacattgacgcaggtgatcggacgcgtcgggtcgagtttacgcgttgcttccgccagtggcgcgaaatattcccgtgcaccttgcggacgggtatccggttcgttggcaatactccacatcaccacgcttgggtggtttttgtcacgcgctatcagctctttaatcgcctgtaagtgcgcttgctgagtttccccgttgactgcctcttcgctgtacagttctttcggcttgttgcccgcttcgaaaccaatgcctaaagagaggttaaagccgacagcagcagtttcatcaatcaccacgatgccatgttcatctgcccagtcgagcatctcttcagcgtaagggtaatggctggtacggtaggagttggccccaatccagtccattaatgcgtggtcgtgcaccatcagcacgttatcgaatcctttgccacgcaagtccgcatcttcatgacgaccaaagccagtaaagtagaacggtttgtggttaatcaggaactgttcgcccttcactgccacactccggatgccgacgcgaagcgggtagatatcacactctgtctggcttttggctgtgacgcacagttcatagagataaccttcacccggttgccagaggtgcggattcaccacttgcaaagtcccgctagtgccttgtccagttgcaaccacctgttgatccgcatcacgcagttcaacgctgacatcaccattggccaccacctgccagtcaacagacgcgtggttacagtcttgcgcgacatgcgtcaccacggtgatatcgtccacccaggtgttcggcgtggtgtagagcattacgctgcgatggatcccggcatagttaaagaaatcatggaagtaagactgctttttcttgccgttttcgtcggtaatcaccattcccggcgggatagtctgccagttcagttcgttgttcacacaaacggtgatacgtacacttttcccggcaataacatacggcgtgacatcggcttcaaatggcgtatagccgccctgatgctccatcacttcctgattattgacccacactttgccgtaatgagtgaccgcatcgaaacgcagcacgatacgctggcctgcccaacctttcggtataaagacttcgcgctgataccagacgttgcccgcataattacgaatatctgcatcggcgaactgatcgttaaaactgcctggcacagcaattgcccggctttcttgtaacgcgctttcccaccaacgctgatcaattccacagttttcgcgatccagactgaatgcccacaggccgtcgagttttttgatttcacgggttggggtttctacaggacgtaacataagggactcctcattaagataataatactggtcaacctttaatctgattagttaaccaattctgtgttgcacacagttatctgtgagaaacccatggaagagaaatggaaataaaaagaactgacaccgcgatcaaaaaaccaaaaactgcaatacccacagcgtgatatagatcgcattaatctttaaaacagcgttgacagaagccataaaataagcaaccgaacgttcgttcgagcgtattgggaacgataaactctcatgacatatggctacagtgaatattttggggggaattctccgaagccgggaaggataatttttgcacagagaaattacgatatgaaacgcgggcacagttatcaccagcccgccgaaaaagagagagaatcaggatgcggttaagataccgccaatcatcgcgcgtaatccctgagcaaagctcgcttcacgcgccaggtcttccgcttcgatatcggccagtacaccgtaggtcagatccagcagtaaacgactagtcattgccgtgttgatgtctgggcttatctcgcctttttgctgggcatcacgcatccgctgggcaacaaattccgtgatcgtcatatgcttatttttaagcatggcggcgacctgtgggttacgcatcccttccgccataatttcaaccaccagcgcccgttgtccaaaggcttcatgggtgagagagacaatggactcgaccatatagtcaacgaaatgaatcccttcaatcggttcccggaaacgggccagcgccctctcctggtcctgtaagataatcgcctgaatcaaggcttctttggagatgaaatggtgatagagcgtcccgggactaatggcgcaagatttacagatggctttcatgctggcactgtgaaatccattttcactaaaaatctctctggcagcattgaggatccgggtccgtgtcggttgtgcttcagtctgcatgttatccatcattaaaccattatagttagcgtgaataactagtttaccgcgttgtcaggtgagcgcctatcattgctgttgaatagtgcgaaggcacactctattcgtatacttttcactctgaaattggttaaccaatagccgtgatttggctgccagttatttagcagagacgttgatgagtttatcccggtaaacaacacgcacggttgtttaccggtccgttagtgtattaattgagctcctgtaccccaccaccggagacggtgagaatttgtccgcttacccagctcgcagcagggctgcaaaggaacagcgctgcgttagcaatatcttgcggttggcccagacgtctgatcggcgtgtgctgtaacattttttgttcaatttctggtgtaataacggatttcagggcatcggttaatattgcccccggcgcaatgccatttacccgaatatttttttcacccaggtcaaacgccatatttctgaccagatgactggccgcagctttagaacttgcataggaagtcatgtttatatttttattttctgccgccatagaagtgatggtcagaataacgccaccgccatttttttccatttctggcgcaacaagttgactcagatggaaaaaagaaaacacattcagttcataagcacggcgaaaatccgccattggcatatcaaacggtttaggtccaccgccaccggcgttgttaaccagaatatcaactttacccagcttactgatagcaaagtctgccagtgcagagagttcctgttcggaagtaatatcacaacggcaggcaaatgcctgaccacccagttgttgaatttcgtctacaacatggttagctgcgtcggcgttaatatcactgaccaccacagatgcgccagctgtcgcgaatgtaatggcgatttctttaccaatacctgcacccgcacctgtgatgatggcgcattttccgtcgagtctcaggttgtcagaattaaacacataaacctcctgtgaacttcagtaaaaataaaaggcaccgcctgtgtgccacattttttatcattaaccttgaggaaaggacactaccaggtatagcagataaagagaggattatttcgctgcaatgagccgggcgggaataataagattgcgactatgcgtctcttcatgggtgattttttgcatcatgcgatccgcaagtgtgataccaagttcccgcgctggcgtgctggcccaggtaacaggtatatcatcaagtgtggttggtgtcgcatcggtaaatgccgccaggctaacctgttgctcaaagtaacgatcgactccgctttccccgctttgccgccctgctttgagcaaaccaaaccatgcccccatcgcaatagtttcgttatagcaaaccacggcactgatggtcgggttatgacgtaaaagcgccgtgatagcttccgcggcttgcttctggctggaagtgcactccaacacccaatcgctatgaaacggcaggccaaattttagtagagttgcacaatagcccccaacccgttctgcacgggttaaactggaactttgccctcccagccaggcgatccgctgatgcccattgcgaatgagatgctccgtcaacaactgtgcagcctgcatgttgtccgggcgaaccgtatcaacatcatcaagataactggcacgggaagcgaaaatcaccgggatagctttttcttctgccatccgtcgcaggtcatcgctacttcctgcagctccggcaattaccacaccatcgacaccctgattcagtaacagactaaaccgctgtgccagctgctcaccgtctttaccgccgtgaagcaaaaaaaccatccgtccctgcgcttccagagcttccgtcaatccggccgtcaattcggcgtaaaacggcgcagataaatcacggacgatcaaaccaatgacgccgctttgcccgccgcgcagcgcgctcgcctggcgattgcgcacaaatcccagctcttcaatggcggcgttaacgcgttctcctgtggcggtagagattcgccctttgccactaagcaccaggctaacggtacttacgctcacgcccgcagccagcgcaacatcatgaatggttatttttttggcggtagccatgcagatgacctactccctgattatgtgacagataaaacgttttaccttttatttatcttatacccgctattatcgttgcgtaatgtgatttatgcctcactaaaatttgataaaacgttttatcttctcgcgcaatttactgaatccagattgttctctacgaggagtcgttttatgacggcgaaaacagcaccgaaagtcacgctgtgggagttcttccagcagttaggcaaaaccttcatgttacccgtggcattattgagcttctgcggcattatgctcggcattggtagttctcttagcagccatgatgtcataaccctgatcccggtcctgggcaaccccgtgttgcaggctatctttacctggatgagtaagattggcagctttgcttttagtttcctgcctgtcatgttctgtatcgccatcccgctgggcctggcacgcgaaaataaaggcgtagcggcattcgctggcttcatcggttatgcggtaatgaacctcgcggtaaacttctggttgaccaataaaggcattctgccaaccacggatgccgcggttctgaaagccaataacatccagagcattcttgggatccagagcatcgataccgggatcctcggtgcggtgatcgccggtattatcgtctggatgctgcatgagcgtttccataatatccgcctgccggatgcgctggcattcttcggcggtacgcgcttcgtaccaattatctccagcctggtgatgggccttgtcggcctggtgattccattagtctggccgattttcgccatgggtattagcggcttgggccatatgataaacagcgcgggtgatttcggaccgatgctgtttggtaccggtgaacgtctgctgttgccgtttggtctgcatcacattctggtggcattaattcgctttaccgacgcaggcggcacgcaggaagtctgcggtcaaaccgtcagcggcgcactgaccatcttccaggcgcaattgagttgcccgaccactcacggtttttctgaaagcgccacgcgtttccttagccaaggtaaaatgcctgcgtttctcggcggtctgccaggtgcagcgttagctatgtatcactgcgcgcgcccggaaaatcgccataaaattaaaggtctgctgatttctggcctgatcgcctgcgtcgttggcggcactaccgaaccgctggaattcctgttcctgttcgtagcgccagttctgtatgtcatccacgcgctgttaaccggcctcggcttcaccgtcatgtctgtgctcggcgtcaccatcggtaataccgacggcaatatcatcgacttcgtggtgttcggtattttgcatggtctgagtaccaagtggtacatggtgccagtggtggcggcaatctggtttgtcgtttactacgtcatcttccgtttcgctatcacccgcttcaatctgaaaaccccggggcgcgatagcgaagttgccagcagtatcgaaaaagccgttgccggtgcgccgggtaaaagtggttacaacgttcctgcaatcctcgaagcattaggcggtgccgacaatattgtcagcctcgataactgcattacccgtctgcgtttgtctgtgaaagatatgagccttgttaatgtgcaggcactgaaggacaatcgggcaattggcgtagtacaacttaatcaacataacctgcaggttgttatcgggccacaagttcagagtgtaaaagatgaaatggccggtctgatgcatactgtccaggcataaggataagatatgttcgattttagtaaggtcgtggatcgtcatggcacatggtgtacacagtgggattatgtcgctgaccgtttcggcactgctgacctgttaccgttcacgattagtgacatggattttgccactgccccctgcattatcgaggcgctgaatcagcgcctgatgcacggcgtatttggctacagccgctggaaaaacgatgagtttctcgcggctattgcccactggttttccacccagcattacaccgccatcgattctcagacggtggtgtatggcccttctgtcatctatatggttagtaaactgattcgtcagtggtctgaaacaggtgaaggcgtggtgatccacacacccgcctatgacgcattttacaaggccattgaaggtaaccagcgcacagtaatgcccgttgctttagagaagcaggctgatggttggttttgcgatatgggcaagttggaagccgtgttggcgaaaccagaatgtaaaattatgctcctgtgtagcccacagaatcctaccgggaaagtgtggacgtgcgatgagctggagatcatggctgacctgtgcgagcgtcatggtgtgcgggttatttccgatgaaatccatatggatatggtttggggcgagcagccgcatattccctggagtaatgtggctcgcggagactgggcgttgctaacgagcggcagcaaaagtttcaatattcccgccctgaccggtgcttacgggattatagaaaatagcagtagccgcgatgcctatttaagcgcactgaaaggccgtgatgggctttcttcccctagcgtactggcgttaactgcccatatcgccgcctatcagcaaggcgcgccgtggctggatgccttacgcatctatctgaaagataacctgacgtatatcgcagataaaatgaacgccgcgtttcctgaactcaactggcagatcccacaatccacttatctggcatggcttgatttacgtccgttgaatattgacgacaacgcgttgcaaaaagcacttatcgaacaagaaaaagtcgcgatcatgccggggtatacctacggtgaagaaggtcgtggttttgtccgtctcaatgccggctgcccacgtagcaaactggaaaaaggtgtggctggattaattaacgccatccgcgctgttcgttaaccccaattgcgcaacgtaaaaaatcgttgcgcaatcgtggatttttaccctgctttgtttttataatggtgcgcacttttatatccagaaaaagagtgcgaccatgattgataccaccctgccattaactgatatccatcgccaccttgatggcaacattcgtccccagaccattcttgaacttggccgccagtataatatcagccttcctgcacaatccctggaaacactgattccccacgttcaggtcattgccaacgaacccgatctggtgagctttctgaccaaacttgactggggcgttaaagttctcgcctctcttgatgcctgtcgccgcgtggcatttgaaaacattgaagatgcagcccgtcacggcctgcactatgtcgagctgcgttttagtccaggctacatggcaatggcacatcagctgcctgtagcgggtgttgtcgaagcggtgatcgatggcgtacgtgaaggttgccgcacctttggtgtgcaggcgaagcttatcggcattatgagccggaccttcggcgaagccgcctgtcagcaagagctggaggcctttttagcccaccgtgaccagattaccgcacttgatttagccggtgatgaacttggtttcccgggaagtctgttcctttctcacttcaaccgcgcgcgtgatgcgggctggcatattaccgtccatgcaggcgaagctgccgggccggaaagcatctggcaggcgattcgtgaactgggtgcggagcgtattggacatggcgtaaaagccattgaagatcgggcgctgatggattttctcgccgagcaacaaattggtattgaatcctgtctgacctccaatattcagaccagcaccgtagcagagctggctgcacatccgctgaaaacgttccttgagcatggcattcgtgccagcattaacactgacgatcccggcgtacagggagtggatatcattcacgaatataccgttgccgcgccagctgctgggttatcccgcgagcaaatccgccaggcacagattaatggtctggaaatggctttcctcagcgctgaggaaaaacgcgcactgcgagaaaaagtcgccgcgaagtaacaaaatggatggtgcaaatgcaccatccatttttcatgcaaggcacaaagtcgcgcgatgtttggcggattcgatgcccagctcaatcaactccattacctggattgcctggcttgccggaaccggattttcaccatcgccatttaacgcatcacgaatagccgcatagtaagccggataattcccaggcaccgtcaacagcgtttcttcgacacgttcctcaccttccacgcgggtaagtacgccatcacgcatatcgtagccccagtcttcctgcggtagacgctcgccatttttcagacgttcttcctgtggatcgaggccatatttcacataactgcctcgggatccatgcacgatataccgtgcactctcagcggctgccagcatggtaccgtgtaaaatgactcgccgctgtggataggacaagatggcgtggaaataatcggtgctctgcgctccgggccgtaactgtgccaaatctaccgtcatgctgaccggtaaaccaaaaagcgtaatggcctgatcaagaagatgtggtgctaaatcgtaccagataccgctgcctgggccgccctgttcacgccaacgatcgcgcacctgcggacggaagcggtcaaaatgagactcaaagtaagcaacttcacccagcacgccttccgcgagtaaaccttttagcgtcaagaaatcgctatcccagcgacggttatggaatacagacagcacacgccccaggctttttgccagcgcatccagctctcgcgcttgactcagtgtcacggtaaagggtttatcaacgaccacatgtttacccgcctcaagcgccgctttggctaacgggaaatgggtatcgttgggtgtaggaatgacaatcaggtctatgttgggatcgttaaacagatgcttcggctcagagacaaccgtaaccgttggccagtcggcttttacttttgtttcatcactgctggagattaccgccagttcctgcccgggcgtgcccgcaatcaggggcgcatggaaggttttgctcgcataaccatacccaatcaacccaacacggatgttgtcgctcatgtcattgcctctcattgaagtatgatggctatttgacactatcctttacccacgctcaacagtttaataacctgccagcaataagggatgttgtttaacttaagtcaaaaaaatagcgaattttccaacgacaaaagctaaatatcgcaaaaacctcagtaaaaatcttgctggagctattattgctaagtaacatttaccccctgaagttaatggatcaatcaagagagatgtgggctgtaatgaatcgtcttattgaattaacaggttggatcgttcttgtcgttagtgtcattcttcttggcgtggcgagtcacattgacaactatcagccacctgaacagagtgctagcgtacaacacaagtaagctctgcacttgtggagcgacatgctgcccgtccgggtgcatgttttcacttgtcggatattaaaccaggaatttattatcttgttcgatgttgttggtgattgtcagggatagtaaagcgcgttactcttttcagagcagtttttcatccctgaatatttgccatcagcgcattcttattattgtaataacacaagcgttcacttttggtgaaattttatcatcactaataatacctacccctttggtattaattattttatggaccttttatgactgttcaggactacttattaaaatttcgcaaaatcagtagtctcgaaagtctggaaaaactctacgaccatcttaattacaccctgacggacgatcaggaactgatcaatatgtatcgtgctgccgatcaccgtcgcgcagagctggtttctggcgggcgtttgtttgacctcggccaggtaccgaagtccgtctggcactatgtccaataaagaaagtagcgatcggttataaaagccttataataacgcccctaaaattagatttgcctgtttgcgtcgctattctggagaacctatgaccaccacaacgccacaacgtattggaggctggttgcttggcccgttggcctggcttttagtcgctctgttgagtacgacgctggcgttgttgctgtataccgctgcgttatcttctccgcaaacatttcaaacgctcggcggacaagcactgacgacacaaatcttatggggcgtttcttttattaccgctatcgccttgtggtattacacactgtggttgaccatcgctttctttaaacgtcggcgttgtgttcctaaacactatattatctggctgcttatttccgtattgctggcagtaaaagcattcgcttttagtcccgtggaagatggcatagccgttcgccagttgctgtttactttgttggcaaccgcattgatcgtcccctatttcaaacgcagcagccgggtaaaagcgacgtttgtgaatccgtaataaccttacagttaacctgttgtcgcctgctctggattaacggataataggcggcttttttatttcaggccgaaaaatgactgactacctgttactgtttgtcggaactgtactggtcaataactttgtactggtcaagtttctcggtctctgtccgtttatgggggtttccaaaaaactggaaaccgcgatgggcatggggctggcaacaacgtttgtgatgacgctggcgtctatttgcgcctggcttatcgatacgtggattttgatcccacttaatctgatttacctgcgcaccctggcatttattctggtgattgctgtggtcgtgcagttcaccgagatggtggtgcgcaaaaccagcccggtgctttaccgtctgctggggatttttttgccgcttatcaccaccaactgtgcagtgctcggcgtggcgttgctgaatatcaatctcgggcacaatttcttgcagagcgcgctgtacggtttttccgccgctgtcggtttcagcctggtgatggtgctcttcgccgccatccgcgaacgccttgctgtggctgatgtcccggcaccttttcgcggtaatgccattgcgttaattaccgcaggtcttatgtctctggcctttatgggctttagtggtttggtgaagttgtaatgaatgctatctggattgccgttgccgccgtgagcctgctgggcctggcgtttggcgccattctgggttatgcctcccgccgttttgcggtggaagacgatccggtcgttgagaaaattgacgaaatcttaccgcagagccagtgtggtcagtgcggttatcccggctgtcgcccctacgcggaagccatcagctgtaacggtgaaaaaatcaaccgttgcgccccaggtggcgaagctgtgatgctaaaaattgccgagttgcttaatgtcgagccgcagccgctggatggcgaagcgcaagagataacgcctgcgcggatggtggcggttattgatgaaaataactgtattggctgcactaaatgtattcaggcgtgtccggtagacgccatcgttggcgctacccgtgccatgcatacggtaatgagtgatctctgtacgggctgcaatttatgtgttgatccgtgcccgacgcactgcatcagcttgcaaccggtcgcagaaacacctgactcctggaaatgggatctgaacaccattcccgtgcgtatcattcccgtggaacaccatgcttaagttattctctgcattcagaaaaaataaaatctgggatttcaacggcggcatccatccaccggagatgaaaacccagtccaacggtacacccctgcgccaggtacccctggcgcagcgttttgttattccactgaaacagcatattggcgctgaaggtgagttgtgcgttagcgtcggcgataaagtattgcgcggccagccgcttacccgtggtcgcggcaaaatgctgcctgttcacgcgcccaccagcggtaccgttacggctattgcgccccactctacggctcatcctagtgctttagctgaattaagcgtgattattgatgccgatggtgaagactgctggatcccgcgcgacggctgggccgattatcgcactcgcagtcgcgaagagttaatcgagcgcatacatcagtttggtgttgccgggctgggcggtgcaggattcccgacaggcgttaaattgcagggtggcggagataagattgaaacgttgattatcaacgcggctgagtgcgagccgtacattaccgccgatgaccgtttgatgcaggattgcgcggctcaggtcgtagagggtattcgcattcttgcgcatattctgcagccacgcgaaattcttatcggcattgaagataacaaaccgcaggcgatttccatgctgcgcgcggtgctggcggactctaacgatatttctctgcgggtgattccaaccaaatatccttctggcggtgctaaacaattaacctacattctgaccgggaagcaggttccacatggcgggcgtagttccgatatcggcgtattaatgcaaaacgtcggcactgcttatgcagtgaaacgtgccgttattgatggcgagccgattaccgagcgtgttgtaaccctgactggcgaagcaatcgctcgcccgggcaacgtctgggcacggctggggacgccagtgcgtcatttattgaatgatgccggattctgcccctctgccgatcaaatggtgattatgggtggcccgctaatgggctttaccttgccatggctggatgtcccggtcgtaaagattaccaactgtctgttggctccctctgccaatgaacttggcgaaccacaggaagaacaaagctgcatccggtgtagcgcctgtgctgacgcctgccctgcggatcttttgccgcaacagttgtactggttcagcaaaggtcagcaacacgataaagctaccacgcataacattgctgattgcattgaatgtggggcttgcgcgtgggtttgcccgagcaatattcccctggtgcaatatttccgtcaggaaaaagctgaaattgcggctattcgtcaggaagaaaagcgcgccgcagaagccaaagcgcgtttcgaagcgcgccaggctcgtctggagcgcgaaaaagcggctcgccttgaacgacataagagcgcagccgttcaacctgcagccaaagataaagatgcgattgctgccgctctggcgcgggtgaaagagaaacaggcccaggctacacagcctattgtgattaaagcgggcgaacgcccggataacagtgcaattattgcagcacgggaagcccgtaaagcgcaagccagagcgaaacaggcagaactgcagcaaactaacgacgcagcaaccgttgctgatccacgtaaaactgccgttgaagcagctatcgcccgcgccaaagcgcgcaagctggaacagcaacaggctaatgcggaaccagaacaacaggtcgatccgcgcaaagccgccgtcgaagccgctattgcccgtgccaaagcgcgcaagctggaacagcaacaggctaatgcggaaccagaagaacaggtcgatccgcgcaaagccgccgtcgaagccgctattgcccgtgccaaagcacgcaagctggaacagcaacaggctaatgccgagccagaacaacaggtcgatccgcgcaaagccgccgtcgaagccgctattgcccgagccaaagcgcgcaaacgggaacagcaaccggctaatgcggagccagaagaacaggttgatccgcgcaaagctgccgtcgaagcggctattgcacgcgccaaagcacgcaagctggaacagcaacaggctaatgcggtaccagaagaacaggttgatccgcgcaaagcggcagttgccgcggctattgcccgcgctcaggccaaaaaagccgcccagcagaaggttgtaaacgaggactaaatggtattcagaatagctagctccccttatacccataaccagcgccagacaagccgcattatgctgttggtgttgctcgcagccgtgccaggaatcgcagcgcaactgtggttttttggttggggtactctcgttcagatcctgttggcaagcgttagtgctctgttagccgaagctctcgtactcaaactacgcaagcagagcgtagccgcagcgttgaaagataacagtgcattgctgacaggcttattgctggcggtaagtattccccccctcgcgccatggtggatggtcgtgctgggtacggtgtttgcggtgatcatcgctaaacagttgtatggcggtctgggacaaaacccgtttaatccggcaatgattggttatgtggtcttactgatctccttccccgtgcagatgaccagctggttaccgccacatgaaattgcggtcaacatccctggttttatcgacgccatccaggttatttttagcggtcataccgccagtggtggtgatatgaacacactacgcttaggtattgatggcattagtcaggcgacaccgctggatacatttaaaacctctgtccgtgccggtcatagcgttgaacagattatgcaatatccgatctacagcggtattctggcgggcgctggttggcaatgggtaaatctcgcctggctggctggcggcgtatggttgctatggcagaaagcgattcgctggcatattcccctcagcttcttagtaacgctggcgttatgcgcaatgttgggctggttgttcagtccagaaacactggcagcaccgcaaattcatctgctgtctggagcgaccatgctcggcgcattctttattttgactgacccggttaccgcttctacgaccaatcgtggtcgtcttattttcggcgcgcttgcgggcttattagtctggttgatccgcagtttcggcggctatcctgacggcgtggcttttgccgtcctgctggcgaacatcacggttcctctgatcgattactacacgcgtccgcgcgtctacggccatcgcaaagggtaaaccatgctgaaaactatccgaaaacacggcattacgttggcgctatttgcagcgggtagtacagggttaactgcggccatcaaccagatgaccaaaacgacgattgctgaacaggccagtctgcaacaaaaggcgttatttgatcaggtgctgccagccgaacgctataacaatgcgctggcacagagttgctatctggtaactgcgccagagttaggtaaaggtgagcatcgggtttacatcgccaaacaggatgacaaaccggcagccgccgttctggaagcaaccgcgccagatggctattccggtgcgattcagctgctggtgggagccgattttaacggcacggtacttggcacgcgcgtgacagagcaccacgaaacgccagggcttggcgataaaatcgaactgcgcctttctgactggatcacccattttgcgggtaaaaaaatcagtggtgcagatgatgcgcactgggcggtgaagaaagatggtggtgatttcgaccagttcaccggcgcgacgattactccccgcgcggtggttaatgcggtaaaacgcgccggattgtacgctcagacgttaccggcacaactttctcaacttcctgcctgtggagaataaagcgtgagcgaaattaaagacgttattgttcaggggttgtggaaaaacaactctgcgctggtccagttgctcggcctttgtcctctgttggcggtcacgtccactgccactaacgctctgggtttaggacttgcgactacgctggtactgacgctgaccaacctgaccattagcacgctgcgtcactggacgccagccgagatccgcattcccatttacgtgatgatcatcgccagcgtggtcagcgctgtacagatgctgatcaacgcctacgcctttggcctgtatcaaagtttagggatttttattccgctgattgtcactaactgtatcgttgtgggccgcgctgaagccttcgccgccaaaaaaggtccggcgcttagcgcactggacggctttagtattggtatgggcgcaacctgcgccatgttcgtgctgggtagtctacgcgaaattatcggcaatggcacattgtttgacggtgcagatgcgctgttaggtagctgggcaaaagtattacgcgtggagattttccacaccgactcccctttcctgctggcgatgctgccaccaggtgcatttattggcctgggactgatgctggcaggaaaatacctgattgatgaaagaatgaaaaagcgccgtgctgaagcagctgcagaacgtgcattgccaaacggtgaaacagggaatgtctgatgaataaagcaaaacgcctggagatcctcactcgcctgcgtgagaacaatcctcatcccaccaccgagcttaatttcagtagcccttttgaattgctgattgccgtactgctttccgctcaggcgaccgatgtcagtgttaataaggcgacggcgaaactctacccggtggcgaatacgcctgcagcgatgcttgaactgggcgttgaaggggtgaaaacctatatcaaaacgattgggctttataacagcaaagcagaaaatatcatcaaaacctgccgtatcttgctggagcagcataatggcgaggttccggaagatcgtgctgcgcttgaagccctgcccggcgtaggtcgtaaaacagccaacgtcgtattaaacactgcattcggctggccgactattgctgtcgacacgcacattttccgcgtttgtaatcgtactcaatttgcgccggggaaaaacgtcgaacaggtagaagaaaagctactgaaagtggttccagcagagtttaaagtcgactgccaccattggttgatcctgcacgggcgttatacctgcattgcccgcaagccccgctgtggctcttgtattattgaagatctttgtgaatacaaagagaaagttgacatctgaagaaaaggggtaacaccgattaccccattgataacctttctttatcctcttttaaaacatctttttaacgtcaatgatgccattgcttagcgttatcatcaggtaatccgtttgcggataaccaaaaatgcaggttaattgtttttttaatagcgaaattttctattcattcgtgatcaagatcacgatgctgtcgcaatgtaaaaacattgcaagaatcaggttaaatcatttaaatttacacacgcaacaaatattgacctacaaaacattacactggctatttttcagaaactggactatctcactagtaaaaacgctaaatagcagaacatatcgccgttaagccatcacccccctctcagtgcagtgaaaaaatctgccgttacgttttttgaaaaatttaacgctggataacatttcccggaatggttgaattccccgcctcagttatatgtaacagattattacaaaggacttgtctgaaagtgcaagatagtgaacattacctgccgtttcccctcccactataacaattgcgcgtatgttttttatacataacgcgagaaagcacccccgttaatatgggatgtaaaaaaagaggtaaaagtgtccactgcaaaccaaaaaccaactgaaagcgtcagtttgaacgctttcaaacaaccgaaggcgttctatctcatcttcagcattgagttatgggaacgttttggttattacggcctacaaggaattatggctgtttacctggttaaacaactgggtatgtctgaagcggatagtatcacccttttctcttcctttagtgccctggtttatggtctggtcgctatcggcggctggttaggtgacaaggtactgggtactaaacgcgtaattatgctcggcgctattgtgctggcgattggttatgctctggttgcctggtctggtcacgacgccggtatcgtttatatgggtatggcggctattgcggtcggtaacggcctgtttaaagctaacccgtcttctctgctttctacatgctatgagaaaaacgacccgcgtctggacggtgcattcaccatgtactacatgtccgtcaacatcggctctttcttctctatgattgctacgccgtggctggccgcgaaatacggctggagtgttgcgtttgcgttgagcgttgtaggcctgctgatcactatcgttaacttcgccttctgccaacgctgggttaaacagtacggtagtaaaccagacttcgagcctatcaactaccgtaacctgctgctgaccattattggtgttgtggcactgatcgctatcgccacctggctgctgcacaatcaggaagttgcgcgtatggcgctgggcgttgttgccttcggtatcgtggttatcttcggtaaagaagccttcgcgatgaaaggtgctgcgcgtcgtaaaatgatcgttgccttcatcctgatgctcgaagccattatcttcttcgtgctgtacagccagatgccaacgagtctgaacttctttgcgattcgtaacgttgagcactccattctgggtctggccgtagaacctgagcagtatcaggcactgaacccgttctggatcatcatcggtagtccgattctggccgctatctataacaagatgggcgataccctgccgatgccaaccaagtttgcaatcggcatggtgatgtgttctggtgcgttcctgattctgccgctgggtgcgaaattcgcgtctgacgctggtatcgtgtctgtaagctggctggtcgcaagctatggcctgcagagcatcggggaactgatgatctctggtctgggtctggcaatggttgctcaactcgttccgcagcgtctgatgggcttcattatgggtagctggttcctgaccactgccggtgcaaacctgattggtggttatgttgcgggtatgatggctgtgccggataacgttaccgatccgctgatgagtctggaagtctatggtcgcgtattcttgcagattggtgtcgctactgccgttattgcagtactgatgctgctgaccgcgccgaaactgcaccgcatgacgcaggatgacgctgcagacaaagcggcgaaagcagccgtagcgtaaaattcagggaaactcttttacaagccgctaacttttcgttagcggctttttttttgttcagcaacgcactaccatactttaaaccacagacaaaaggagttaccgatgaaattgttctacaaaccgggtgcctgctctctcgcttcccatatcaccctgcgtgagagcggaaaggattttaccctcgtcagtgtggatttaatgaaaaaacgtctcgaaaacggtgacgattactttgccgttaaccctaaggggcaggtgcctgcattgctgctggatgacggtactttgctgacggaaggcgtagcgattatgcagtatcttgccgacagcgtccccgaccgccagttgctggcaccggtaaacagtatttcccgctataaaaccatcgaatggctgaattacatcgccaccgagctgcataaaggtttcacacctctgtttcgccctgatacaccggaagagtacaaaccgacagttcgcgcgcagctggagaagaagctgcaatatgtgaacgaggcactgaaggatgagcactggatctgcgggcaaagatttacaattgctgatgcctatctgtttacggttctgcgctgggcatacgcggtgaaactgaatctggaagggttagagcacattgcagcatttatgcaacgtatggctgaacgtccggaagtacaagacgcgctgagtgcggaaggcttaaagtaatagccatcggcccacaggtcgttgtgggccgaaatgagatatttcagagctttgttgcgctgaagtaatgttctggtttggcaatacgatcctgagcagccaccacttgcagctcatattcctgcattgctttggtggtcaccatgatttcgtagactgcagcggtcacatgttccagcgcctcctgcagcgttgccccctgaagcagtttcaccagcagtaaaccgctcgtcacatcaccaacacctaccggctggcgcataccaaaatccaccagcggacggctgatatgccaggcttcatcggcggtgaccagcagcatttcaaaacggtcacggctgtagccagctcgcgccaggtgtttaaccaacacaatttgtggcccttgcgcaatgagttcgcgcgctgccagaaccgcttcttcgacgttatttaccgcatgctcacagagtatttccagctcaaccagatttggcgcaatgatatcgctggcaggcaaaccgtgccgcacatgaaactctgcgacacccggtgcaacgatacagcctttttccggatgacccattaccggatcgcaaaaatatttcgcctgcggattcgcggctttcacctgacggacgataccgaggatatgttcaccctgctccgcgcttcccagatagccacttaatacggcatcacaggtgtgtaatttatcaatggcggcaatgccttgcacaatttcggttaaatggctgggcggcatcacgcagccagtccatttgccgtattgggtgtgattagaaaattgaacggtgttcagcggccagacgttcgcgcccaggcggcgcatcggaaactctgccgcactgttacccgcatgaccataaacaacgtgagactggatagcgagaatatttttcatcatgttccctgtataaaaaccagggggagtgatttctcactccccctttccacttaatgcattatttccagcaaatcagacagtaattctttttaccgcgacgcagtaaggtaaaacgaccaaacagacgatcttcttctttaaagaagtattcaggatcggactgtttttcaccgttaatggtgatggcattggaggcgatagttttacgtgcctgaccacgggaaggttgcagttcagaatcgaccagtgcctgcatcaggtctgcgcccttttccatctcaaccatcggtacgccgtcctgcgccagctgttcgaagtccgcttcactcagcgcactcaaagaaccgctgaacaggcattcggtaatacgttttgccgcctgtaaaccttcttcaccgtgaaccagacgagtcacctgctccgccagtacatactgggcgcgcggtgctttaccgctgtttttatcttcttcttccagggcgttgatctcttcaatgctcataaaggtgaagaacttcaggaagcggtaaacgtcggcatccgcagtgttgatccagaactggtagaatttgtacgggctggttttcttcggatccaaccagactgcgccgccttcagttttaccaaatttggtgccatctgctttagtgatcagcggaacggtcaggccaaacacctgattctgatgcagacgacgggtcaggtcgataccagaagtgatgttaccccactggtcagaaccaccaatttgcagcaccacaccgtactgtttgttcagacaggcgaagtcataaccctgcaacaggttgtaggaaaactcagtgaagctaatcccctgatcttcacggttgagacgctgcttaaccgcttctttgttgatcatctggttaacggagaagtgtttgccaatatcgcgcaggaaggtcagcacattcatattgccgaaccagtcatagttgttcgccgcgatagcagagttttctccacagtcgaaatcgaggaacggggcaacctgcttacggattttgtccacccactcctgaacagtttcttcggtgttcagcttacgctcggcagctttgaagctcgggtcgccaatcagacccgtcgcgccgcctaccagcgcaaccggcttgtggcccgcctgctggaagcgtttcaggcataacaatggaacaagatgccccaaatgcaagctgtcagcggtaggatcgaagccgcaatagagcgcgatcgggccttgcgccagtcgctctgctaacgcttcctcgtccgtcacctgggctaccagcccccgctcttgcaattgtttaatcaagttactgcttgccatcaaaatctccatgtatataacgactgcacctttgccggtacacgacttttcgccagatgcgaaagagacatagaataaagtgccagaatcaggagtaccagcgattaaagcaagatttttgcatcttttcagggtgcaagacgatcaatcttccacgcatcattttcacgctggtacaaaaagcggtcatgcaggcgatgctcaccaccctgccagaactcaatctgttcaaggctgacgcgaaaaccgccccaaaagctcggcaatggcacttcgccctgttgaaacttctgcttcagctccaggaatttactttcaaggataccgcgggcagaaatgcgactggactgcttgctaacccatgcaccaatctggctatcacgcgggcggctatgaaaatatttcatcacttcgagagtgctaagtcgttctgctttaccgatcaccatcacctggcgctcaagggtatgccacgggaacagcaggctaacgcgcggattattttcgatttgatgtgctttacggctgccgaggttggtgtaaaacaccatgcctttttcgtcgtaatgtttgagtaaaacgatgcgctgataaggctgaccatgttcatccacggtagcgaccaccatcgcggtagggtccgccagtttggcttcacaagcctgagagagccaacgttcaaaaagggttaatggatcggcgggaagatcgcggcggcgtaacccgcctttggtgtattcacggcgcagatgcgcgatttgctgcaattcgtcgttatcagacatggttttctttacggattgtcagtgggtgacgctattgtgcgccgcccctggaaaaatctcaacgctgtggattttgtaactgacagttattcaagacgatgcggtcgcgtttatagacagtcgcttcatcgcctttgctccagaaaacatagattccgtcagtgtaacgcgcgccagaggcactaatgccctgtttgagatgcagtagttgattatcgtaaacaaaactgacctcctggcgcggattattcagtttgaccgtcaacggtttttcatcacactggtattccagcgtatcggtttgcatgcgctcaaccagctgattaaaggcgctacagccggagagaaggaccggcaaaatgataattaacagttttttcatagtcatatcccgaagactttcctggtctggagggcaatacgccctccctaacgttccaagtgtaacggcagacgcggtaagaaaaattcagttaactctgatatcacgggttagcggggaaaatagcccccagtaccgtctcctggcttgcgccagtgacggaaggcagatttcctggtaatcccgccagcgtccgccaggcaagccaggcgaaagccaatgcttccatgtcatcgccactaatgccaacggcatcggtggtggtgacttctgtgcctggcagtaatgccgccagacgcgccatgagtagcggattacgactacctccaccacataccatcaatcgttcgcagccaccgctcaacaaaacttgttcagaaatggtcacggcggtgagttctgccagtgtcgcctgcacatctcggggatcaacacccggaaaatggcgcaaatggcgctccagccaaccatagttaaagtattcgcgtccggtgcttttcggtgcaggttggctgaaatacgggtcgctgagcatattttgcagcagtgggagaataactttacccgcccgtgcccactcggcatctttatcgtaaggtttaccggcctgacgccagatccaggcatccatcagcatgttaccaggaccggtatcgtagcccccaaccggctgcccaggaatgagcagactcagattggcgatgccgccaatattgagcaccattcgtcgctcggttgggtgagccagcagcgcatgatggaacgcaggtaccagcggtgcgccttgtcctcccaaggcaatatcgcgacggcgaaaatcaccgacaaccgtaattccggtgcgtgccacaatttgattgttatcgccaatctgtaaagtgtgtggtgccacgcccgtcggttcatgccagacggtttgaccgtgacaaccgatcgcaactatatctcttgcctgcagattttgttccttaagcaaggcattgaccgcatcagcaaaaagttgcccgagttgagtatcaagctgtccaaactggctaagtgtaagctgctggccctggcaaatatccagtacagcctgtttcagagataccgggatcggccaactcaaacttgccagctgtgcgacccggtgttcatcaattgtcgccaacacaacatcaacaccatcaaggctggtgccactcataacgccaataaagcggccgcttttcatagttcatcctttttcaatctgacgtttgcgcaccactcaaacataaacttttcgtgaataccatgcggaatgaccgatttttaccgttggtagtaaaacattatcttcaaatcaataatcatcatgaatgttttgtttataattggttgatcctactttcattatgatttgctcatatttggtagaacatgtaaccatggattcacatatgccatatactttgaccatgagggatgcttgcgtggcgtttcatggtgaacaggagatttttcaatgattaaacgcgtattggttgttagtatggtaggtctgtctcttgtcggttgtgttaataacgacaccctgagtggggatgtttataccgcttctgaagcgaaacaagtacagaatgtcagctatggcaccatcgttaacgtacgtccggtacagattcagggcggtgatgattccaacgttatcggtgcaattggcggtgctgttcttggtggtttcctggggaatactgttggtggcggaaccgggcgttctctggctactgcagcaggcgctgttgcaggtggcgtagctggtcagggcgtacagagtgcaatgaacaaaacgcagggtgtcgagctggaaattcgtaaagacgatggtaataccatcatggtggtacagaaacaaggcaacactcgtttctctccgggccaacgtgtcgtactggccagcaatggcagtcaggtgaccgtttctccgcgctaaataagtttgcgtgtggtcaggttactgaccacacgcccccttcatttcaccctttggcctgtaactcaatgatattatgctcaagttttgcgatgagcgtaatcagttgctccagttcctctgcggagatgccatgtaatatttccgcgcgggttttgttaataacagcttccatttcgctgatcagcggctctgccttttccgtcagtttaatacgtttagcccgacgatcgctggcacaagtttgacggctaattaaccctttttcttccagttggtccagagtacggaccagacttggctgctcgatgccaatcgcttttgccagttgaatttggctctggtctggaggtaactgatggatattgtgtaacgtaacccaatgggtttgtgttaactccagcggtttcaggcgatggtctatcagagcacgccatatgcgcaccaaccgtgccagatcagaacctagtgggctttccaatttcatctccttataattagcttgctaagatattatgcggcttttagaatagtgtgcagcaattgtattgctaaaacaaatgtattgctgcatttggttaccgtcagacatatttttcagaaattgcgcgtaaatttttcgcacttaaagaatatttattaatctaacgcaatatattcggtcgtaaaggaatctactttgtgaagtttatgctcaatgcaacaggattgcccttacaagatctggtgttcggtgcgtccgtctactttcctccgtttttcaaagcattcgcgtttggattcgtcatctggcttgtcgtacaccgcctgcttcgtggctggatctacgccggtgacatctggcatcccttgttaatggatttaagcctgtttgcgatttgcgtttgccttgctctggcaatactgattgcgtggtaactatgagtattaaaacaattaagtatttcagtacaatcattgtagcggtagttgcggttcttgccggatggtggctgtggaattattacatgcaatctccgtggacacgcgacgggaaaatacgcgcagaacaggtttctatcaccccacaggtgagcggacgtattgttgagctgaatataaaagacaaccagctggttaacgcgggggatcttctgctcacgatcgataaaacgccctttcagatcgccgagctgaacgcacaggctcagctggcgaaagcgcaatctgacctcgcaaaagccaataacgaagcgaatcgtcgtcgtcatctcagtcaaaattttatttctgccgaagaactcgataccgctaacctcaatgttaaagcgatgcaggccagtgttgatgccgcacaggcgacgctgaaacaggcacaatggcaactggcgcaaacggaaattcgcgccccggtgagtggatgggtgactaaccttactacccgcatcggcgattacgctgataccgggaaaccgctgtttgcccttgtcgacagccacagcttttacgtcattggttattttgaagaaaccaagttgcgccatatccgcgaaggtgcaccagcacaaattaccctctatagtgataacaaaacgttacagggtcacgtttccagtatcggtcgggcgatttatgatcagagcgttgaaagtgacagtagccttattccggatgttaaacctaacgtcccctgggttcgactcgcccaacgcgttcccgtccgctttgcgctggataaagtcccaggcgatgtcacgttggtgagcggcaccacctgtagcattgccgtaggtcaataatgaacgcaagcagttggtccttgcgcaatttgccctggttcagggccacgctggcgcaatggcgttatgcgttacgcaataccattgccatgtgtctggcgctgacggttgcctattatttaaatctggatgaaccctattgggcgatgaccagcgctgcagtggttagctttcccaccgttggcggtgttatcagcaaaagcctcggacgcatcgctggcagtttgctcggagccattgcggcactgcttcttgccgggcatacgctcaatgagccgtggttttttctattgagcatgagcgcgtggcttggcttttgtacctgggcctgtgcgcacttcacgaataacgtcgcgtatgcatttcaactggcgggctacacggctgccatcatcgcctttccgatggttaatattactgaggccagccagctgtgggatatcgctcaggcgcgcgtttgcgaggtaatagtcggtattttgtgcggcggcatgatgatgatgatcctgccgagcagttccgatgctactgcccttttaaccgcattgaaaaacatgcacgcccgattactggaacatgccagtttactctggcagcctgaaacaaccgatgccattcgtgcagcacatgaaggggtgattgggcagatactgaccatgaatttgctgcgtatccaggctttctggagccactatcgttttcgccagcaaaacgcgcgccttaatgcgctgctccaccagcaattacgtatgaccagtgtcatctccagcctgcgacgtatgttgctcaactggcccagtccgccaggtgccacacgagaaattctcgaacagttgctgacggcgctcgccagtagccaaacagatgtttacaccgtcgcacgtattatcgccccgctacgcccgaccaacgtcgccgactatcggcacgtcgccttctggcagcgactacgttatttttgccgcctttatctgcaaagtagtcaggaattacatcgtctgcaaagcggtgtagatgatcataccagactcccacggacatccggcctggctcgtcataccgataacgccgaagctatgtggagcgggctgcgtacattttgtacgttgatgatgattggcgcatggagtattgctagccaatgggatgccggtgccaatgcattaacgctggcagcaattagctgcgtactctactccgccgtcgcagcaccgtttaagagcttgagtcttctgatgcgcacgctggtgttacttagcctattcagctttgtggtcaaatttggtctgatggtccagattagcgatctgtggcaatttttactgtttctctttccactgctggcgacaatgcagcttcttaaattgcagatgccaaaatttgccgcattgtgggggcaactgattgtttttatgggttcttttatcgctgtcactaatcccccggtgtatgattttgctgattttcttaacgataatctggcaaaaatcgttggcgtcgcgttggcgtggttagcgttcgccattctgcgtccaggaagcgatgctcgtaaaagccgccgccatattcgcgcgctgcgccgggattttgtcgatcagctaagccgccatccaacactgagtgaaagcgaatttgaaagcctcacttatcatcacgtcagtcagttgagtaacagccaggatgcgctggctcgccgttggttattacgctggggtgtagtgctgctgaactgttctcatgttgtctggcaattgcgcgactgggaaagccgttccgatccgttaagccgagtacgggataactgtattagtctgttgcggggagtgatgagtgagcgtggcgttcagcaaaaaagtctggcggccacacttgaagaattacagcggatttgcgacagccttgcccgtcatcatcaacctgccgcccgtgagctggcggcaattgtctggcggctgtactgcagccttagccaacttgagcaagcaccaccgcaaggtacgctggcctcttaattacttaattacaccacaggcatagcgttcaccgccaccgcccagcggtttaggttgatcggacatattatcgccgccaacgtggaccatcagcgctttgtctttgatttcatccagacttttcagacgaggcgcgatgacggcatcggtagctttgccgtcattattgacgaccagtgcaggcagatcgcctaaatgcccggcaccttctggcccttcatgtttaccggtattttgtggatcaagatgcccgcctgcggattccgcggcgctggctttgccatctttggtggctggctggcagcttcctttggcatgaatatggaagccatgttcaccggggggtaatgctttcagatcggggctaaactccagacctttatcggtttcagtaatggtgacgctaccaatactctgccctaccccttggctcgtgacgaggttcatctcgactttttcactggcagcttgtgcgccggttgcaacaaccagcgccagaatagccagactaaaacgtttcataggacctccgttcattgtgcattcctgaataagtgtaaaccagtgacacatttttgaacggcggctattcctaaaagtgcttacggtacgtcgtaccccagtgccgctttacggatacgaaaccattgttgacgggtcattttcagtgtttctgcttcgacagctgcccgtacgcgctcaattttaccactaccgataattggcagcggctggcttggtaaacgtaatacccaggcgtaaaccacctgttcaatgctgcccgcgtttaactcctctgccaccacagccagttcatcacgcagcggctggaaataatcatcattaaacagacgaccaccaccaaggcaggaccacgccatcggacgaacacgcagttgttgtagttggtcgagcgtgccatccagcagtaacggctgatgcaccggggatatttccacctgattagtggcaagggtaaacggcagacgactttgcaacagggcaaattgcgcaggcgtaaagttgcttacgccaaaatgacgcactttgccgctctgatgcagatgtttgaacgcgtccgccacttcatcggcatccattaacgggtctggtcggtggattaacagcaaatccagatgatcggtcgcgagattaattaggctctgttcggcgctcttaatgatgtgatcgcggtcagtgatgtaatgaccaatgacgttttcttcacgcgcggtcgtcgcgataccgcatttactgacgatttccatccgttcacgcaggtgaggtgccagtttcagtgcctcgccaaacgccgcttcgcactgatagccaccataaatatcagcatggtccacggtggtcacgccgagatccagatgctcttcaataaaactgaccagctggcgggcggacatattccagtccatcaatcgccagtagcccatcacaaaacgggaaaactccgggccttgcggcgcaatagtaatacgctgaaccataatcgcttcctcttatcagatatgagaggagtatacgcaagattaggttcaaaagagacttggttgctccggttcgtcactactcgctggcttatttgcgcgtaatttgcgcattaatcgctgccgacaaaggcgcagcacctcttgtttttcgccatcgctcattttattccagttaaaacgctcatcacgactacgaaaacagccgcgacaaaacccgcgttcgtcagactggcaaattccccggcacgggctctggacgggaaagaactctaattgctccgccacttcgccctcctcagataagattattaccattattgaagctgttaatgtccaaagtagcaactttgcttgcactagaccgactggtctactacactccaacgcatgaacaaacacaccgaacatgatactcgcgaacatctcctggcgacgggcgagcaactttgcctgcaacgtggattcaccgggatggggctaagcgaattactaaaaaccgctgaagtgccgaaagggtccttctatcactactttcgctctaaagaagcgtttggcgttgccatgcttgagcgtcattacgccgcatatcaccagcgactgactgagttgctgcaatccggcgaaggtaactaccgcgaccgcatactggcttattaccagcaaacactgaaccagttttgccaacatggaaccatcagtggttgcctgacagtaaaactctctgccgaagtgtgcgatctgagtgaagatatgcgcagcgcgatggataaaggtgctcgcggcgtgatcgccctgctctctcaggcgctggaaaatggccgtgagaaccattgtttaaccttttgtggcgaaccgctgcaacaggcacaagtgctttacgcactgtggcttggcgcgaatctgcaggccaaaattagccgcagtttcgagccactggaaaacgcgctggcccatgtaaaaaacattattgcgacgcctgccgtttaacaggcattttttatcaccagacgaccgggagcctttatgagttctgaaaaactgtattccccactgaaagtgggcgcgatcacggcggcaaaccgtatttttatggcaccgctgacgcgtctgcgcagtattgaaccgggtgacattcctaccccgttgatggcggaatactatcgccaacgtgccagtgccggtttgattattagtgaagccacgcaaatttctgcccaggcaaaaggatatgcaggtgcgcctggcatccatagtccggagcaaattgccgcatggaaaaaaatcaccgctggcgttcatgctgaaaatggtcatatggccgtgcagctgtggcacaccggacgcatttctcacgccagcctgcaacctggcggtcaggcaccggtagcgcctagtgcacttagcgcgggaacacgtacttctctgcgcgatgaaaatggtcaggcgatccgtgttgaaacatccatgccgcgtgcgcttgaactggaagagattccaggtatcgtcaatgatttccgtcaggccattgctaacgcgcgtgaagccggttttgatctggtagagctccactctgctcacggttatttgctgcatcagttcctttctccttctagtaaccatcgtaccgatcagtacggcggcagcgtggaaaatcgcgcacgtttggtactggaagtggtcgatgccgggattgaagaatggggtgccgatcgcattggcattcgcgttagtccaatcggtactttccagaacacagataacggcccgaatgaagaagccgatgcactgtatctgattgaacaactgggtaaacgcggcattgcttatctgcatatgagtgaaccagattgggcggggggtgaaccgtatactgatgcgttccgcgaaaaagtacgcgcccgtttccacggtccgattatcggcgcaggtgcatacacagtagaaaaagctgaaacgctgatcggcaaagggttaattgatgcggtggcatttggtcgtgactggattgcgaacccggatctggtcgcccgcttgcagcgcaaagctgagcttaacccacagcgtgccgaaagtttctacggtggcggcgcggaaggctataccgattacccgacgttgtaatccaacattgcgagcggcgtaaagccgccgctatactaaaacaacattttgaatctgttagccattttgaggataaaaagatgcgtcttcttcataccatgctgcgcgttggcgatttgcaacgctccatcgatttttataccaaagtgctgggcatgaaactgctgcgtaccagcgaaaacccggaatacaaatacagtctggcgtttgttggctacggcccggaaaccgaagaagcggtgattgaactgacctacaactggggcgtggataaatacgaactcggcactgcttatggtcacatcgcgcttagcgtagataacgccgctgaagcgtgcgaaaaaatccgtcaaaacgggggtaacgtgacccgtgaagcgggtccggtaaaaggcggtactacggttatcgcgtttgtggaagatccggacggttacaaaattgagttaatcgaagagaaagacgccggtcgcggtctgggcaactaatctcctgccgggcgtgaactcatcgcgcccgcatctttactgcatcgacaagtaatatttgtcataatgcgcgctgcaatttatccgtattaagagaatcagatgtccgataacgctcaacttaccggtctgtgcgaccgttttcgtggtttttatcctgttgtgatcgatgttgaaacagccggatttaacgccaaaaccgatgcgctgcttgagattgccgccatcaccctgaaaatggatgaacaaggctggctgatgccggacaccacattacatttccacgtcgaaccatttgtcggcgcaaatttgcaaccagaagccctcgccttcaacggcattgacccgaacgatcccgatcgcggcgcggtcagcgaatacgaggcgctgcacgaaatttttaaagttgtacgtaaaggtattaaagcgagcggctgtaaccgcgccattatggtggcgcacaatgccaattttgatcacagctttatgatggccgccgcagaacgcgccagtctgaaacgtaacccgttccaccctttcgccacttttgacactgctgcactggccgggctggcactcggacaaaccgtattgagtaaggcttgccagaccgctggcatggacttcgacagcacccaggcgcactccgcgctgtacgacaccgaacgcactgctgtgctgttttgtgaaatcgtcaaccgctggaaacgtctgggaggctggccgctatctgccgccgaagaggtgtaatcgagtcgatgcctgatgacatgcaatgattcaggcatctatagtgaggctattccacgcatcctgcatgatattcacggggaatagcgttaatggcagataatccagaccctagtagcctcctgccggacgtgtttagtccggcgacccgcgactggtttcttcgcgcctttaaacagccgaccgctgtccagccgcaaacctggcatgtggcggcgcgaagcgaacatgcgctggtgattgcaccgaccggctccgggaaaacgctggcagcatttctctacgccctcgatcggctcttccgcgaaggcggcgaagatacccgcgaggcgcataagcgtaaaaccagtcgcatcctctatattagtccgataaaagccctgggcaccgacgttcagcgcaacttgcagatcccgttgaagggtattgccgatgaacggcggcggcgcggcgaaacggaagtcaatcttcgcgtagggatccgtactggcgatacgcctgcacaggaacgcagcaaactcacccgtaatccgccggatattctgatcaccacacccgaaagtctctatctgatgctgacctcccgcgcgcgcgaaacgctacgcggcgtcgaaacggtaattattgatgaagtccacgcggtagcgggcagtaaacgtggtgcgcatctggcgttaagtctggagcggctcgatgcgctgctccacaccagtgcacagcgaattggcctttctgccactgtgcgcagtgccagcgatgtggcagcatttcttggtggcgatcgcccggttacggtagtcaacccgcccgcaatgcgccatccgcagatacgaattgtcgtaccggtcgccaatatggatgatgtcagtagcgtcgccagcggcaccggcgaagacagccatgccggccgggaaggctccatctggccatatattgaaacgggtatccttgatgaagtgttgcgccatcgcagcaccattgtctttactaatagccgggggctggcggaaaaactgacggcacgattaaatgagctttacgccgcacgcttacagcgttccccgtctatcgccgttgatgcggcccatttcgagagcacctccggcgcaacctctaaccgtgtacaaagtagcgacgtttttattgcccgcagtcaccacggctccgtctctaaagaacaacgagcaatcaccgaacaggcgctgaaaagcggtgaattacgctgcgtggtcgcaacctccagtcttgaactggggattgatatgggcgcggtggatctggtgattcaggtggcaacgccgctttctgttgccagtgggttacaacgcattggtcgcgccggacatcaggttggcggtgtatctaaagggctgtttttcccccgtacccggcgtgatttagtcgattccgcagtcattgtagagtgtatgttcgcaggcaggctggaaaacctgacaccaccgcataatcctctcgacgtccttgcgcagcaaaccgttgccgccgcggcgatggatgcattacaggtagacgaatggtactcccgcgtacgccgtgccgcaccgtggaaagatctgccaagacgtgtttttgacgccacgctggatatgctttccgggcgctatccctctggcgatttttctgcttttcgccccaaactggtctggaacagggagaccgggatattgaccgcccgacctggcgctcaattgttggcggttaccagcggcggcaccattccggatcgtggcatgtatagcgtgttattacccgaaggtgaagaaaaggccggtagccggcgggtgggtgaactggatgaggagatggtatatgagagccgggtgaacgacattatcactctcggcgctaccagttggcggatccagcaaatcacccgcgatcaggtgattgtgactcctgctccgggtcgttctgcccggctccccttctggcgtggtgaaggtaacggacgtccggctgaattaggcgagatgatcggcgattttcttcatttgctggcggatggcgcgttcttttccgggactattcccccgtggctggcagaagaaaatacgatcgccaatattcaggggttgattgaggagcagcgcaacgcgacgggcatcgttccggggagtcgccatctggtcctcgaacggtgccgtgatgaaattggtgactggcgtattattttgcactctccctatggaagacgggtgcatgaaccctgggcggtggcgattgccgggcgaatacatgcgctatggggcgctgacgcgagcgtggtcgccagtgatgacggcattgttgcacgtattcctgacaccgatggtaaattgcccgatgccgcgatttttttgtttgaaccagaaaagttgctgcaaattgtccgcgaggcggtaggcagcagcgcacttttcgccgcccgttttcgcgaatgcgccgcgcgggcattattaatgccggggcgcactccgggccatcgcaccccgctttggcaacaacggctgcgcgccagtcagttgctggaaatcgctcagggatatccggattttccggtcattctcgaaaccctacgcgaatgtctgcaagatgtttatgatcttcccgcactggaacgtttgatgcgtcgcctgaacggtggcgaaattcaaatatccgatgtaacgaccactacgcccagccctttcgccacaagtttattgttcggctatgtcgcggaatttatgtaccagagcgacgccccgctggcagagcgccgggcatccgtactgagcctggacagcgagttactgcgcaatctactcggacaggtcgatccgggggaattactcgacccgcaggtcattcgccaggtggaagaagagttgcaacgactggctcctggcagaagagcgaaaggtgaagaaggattgttcgacctgctgcgcgaactggggccaatgaccgttgaagacctggcgcaacggcatacaggcagcagtgaagaggttgcgagctatctggaaaatcttcttgcagtaaaacgaatcttcccagcgatgattagcggacaggagcgtcttgcctgtatggatgatgccgccaggctgcgtgatgccctcggcgtacgactaccagagagtttgccagagatttatttacatagagtcagttacccgcttcgcgacctctttctgcgctatctccgggctcatgctctggtcacggctgaacaactggctcatgagtttagtctcggtattgccattgtcgaagagcagcttcagcaactgcgtgaacagggtctggtgatgaatctgcaacaagacatctgggtgagcgatgaagtatttcgtcgtctgcgtttgcgcagcctgcaagccgccagagaagcgacgcgtcccgttgcagccacgacctatgcgcgattgctgctggaacgtcagggcgtattacccgccaccgatggtagcccggcgctctttgccagtacaagcccaggcgtttatgagggcgtagatggcgtgatgcgggtgatcgaacagcttgccggagtcggtttacccgccagtctctgggaaagccagatcctgcctgcccgcgtacgcgactatagcagtgaaatgctcgatgaattactggcaaccggtgcggttatctggagcgggcaaaaaaaactgggtgaagatgacggcctggtggcactgcatctacaggaatatgctgcagaaagcttcactcccgccgaagcggatcaggcgaatcgtagcgcgctgcaacaagcgatagtcgctgttctggctgacggaggagcctggtttgcacaacaaatcagccaacggatacgcgacaaaatcggcgaaagcgttgatctctctgccctgcaagaggcgttatgggcgctggtctggcaaggcgtcatcaccagcgacatttgggcaccgttacgcgccctcacccgcagcagttccaacgcacgcaccagtactcgccgcagtcaccgggctcgtcgtggacgtcctgtctatgcgcaacccgtcagcccgcgggtatcttacaacacaccaaatctggctggacgctggagcttattgcaggtggagccactaaacgataccgaaaggatgctggcgctggcggaaaatatgctcgaccgctacggcatcatcagtcgtcaggcggtgatagccgaaaatatccctggcgggtttccaagcatgcaaacgctttgtcgaagtatggaagactccgggcgaattatgcgaggtcgttttgtagaaggtctgggtggcgcgcaattcgctgaacgtctgactattgaccgattgcgcgatctggcgacacaagccacgcaaacgcgccactatacaccagtggcgctctctgccaacgatccggctaatgtgtggggaaatcttctgccctggcctgcacatccggcaacgctggttccaacgcgtcgggcgggtgcgctggtggtcgtttctggcggcaaattgttactctatctggcgcaaggtggcaaaaaaatgctggtctggcaggaaaaagaggaattactcgccccagaggttttccacgcgctgactaccgcactgcgtcgcgaaccacggctgcgctttacgctaacagaagtgaatgatctaccggtccggcaaacgccgatgtttacgctgctgcgtgaggcgggatttagtagtagcccacaagggctggattggggataaagaaaggactgacggatgcccgttcgcatccgtcagtattgcaggacggattattccgcgtccggctcttcagacttgtatttagcggcagtttctttgatcagctgctgcagttcgccacgctgatacatttcgatcacgatatcacaaccgccgaccagctcgccgtcaacccacagttgcgggaaggtcggccagttagcatatttcggcagttccgcacgaatgtccggattctgcagaatatcaacataggcaaaacgttcgccacatgcggcaagcgcctggactgcctgggcagagaaaccgcagctcggcagtttcggactacctttcatgtacagcaggatcgggttttcagcaatctggcgttggattttttcgatagtggtgctcattgtcttgcttcctcaaacttctttacggcagtaatctgacattgtagcgggtcagtgcggcatcggaaaataacattttcatcacgcttttgctattttatccctttgctctatttgttgcatttcaaatattcgtttcttctctgatgccggcaaactggcgtatttataaccatttttagctttcactgctgcatttttttgcgctcgccaacgaaacgtattttttaacaataaaagctattaactttctcttcttctatgcattagaatcatcaagttttgtaaatcagacgcaggcatgatagacctgcctttacagagggacgctcagtggcgcggataaaccgtattagcatcacgctctgtgctttactttttaccaccctgcctttaacgcctatggcccatgctagtaagcaagccagggagagttctgctaccactcatatcaccaaaaaagcagataaaaagaaaagcacggcaaccaccaaaaagacccagaaaacagcgaaaaaagccgccagtaaaagtacgaccaaaagcaaaaccgcttcttccgttaaaaaatcttccattaccgcttctaaaaacgccaaaactcgcagcaaacacgccgtcaataaaacggccagtgccagctttaccgaaaagtgtaccaaacgtaagggctataaaagccattgtgtgaaagtcaaaaatgccgcgagtggaactcttgccgacgcgcacaaagcgaaggtgcaaaaagctacgaaagtggcaatgaataaactgatgcagcaaattggtaagccatatcgttggggtggcagcagtccgcgtaccggttttgattgcagcggcctggtttattacgcttataaagatttggtgaaaattcgtattccgcgtacggcgaatgaaatgtatcacctgcgtgatgcagcgccaatcgaacgtagtgaactgaaaaacggcgacctggtctttttccgtactcagggacgcggcacagccgatcatgtcggcgtgtatgtcggcaacggcaaatttattcagagtccgcgcacaggtcaggaaattcaaatcacttctctcagtgaagactactggcagcgccactatgttggcgctcgtcgggtaatgaccccaaaaacacttcgctaaaactttaccctgttgttacggcaacagggtaagttcatcttttgtctcaccttttaatttgctaccctatccatacgcacaataaggctattgtacgtatgcaaattaataataaaggagagtagcaatgagtttcgaattacctgcactaccatatgctaaagatgctctggcaccgcacatttctgcggaaaccatcgagtatcactacggcaagcaccatcagacttatgtcactaacctgaacaacctgattaaaggtaccgcgtttgaaggtaaaagtctggaagagattattcgcagctctgaaggtggcgtattcaacaacgcagctcaggtctggaaccatactttctactggaactgcctggcaccgaacgccggtggcgaaccgactggaaaagtcgctgaagctatcgccgcatcttttggcagctttgccgatttcaaagcgcagtttactgatgcagcgatcaaaaactttggttctggctggacctggctggtgaaaaacagcgatggcaaactggctatcgttagtacctctaacgcgggtactccgctgaccaccgatgcgactccgctgctgaccgttgatgtctgggaacacgcttattacatcgactatcgcaatgcacgtcctggctatctggagcacttctgggcgctggtgaactgggaattcgtagcgaaaaatctcgctgcataataactgatggcaaatgcagcattgcctgaagcgctacgcttatcaggcctacgcggatcatcgatgtaggtcggataaggcactcgccgcatccggcaagataaatcgcacgttgtcagcaactgtaacgcagaaggttatccttctgcgtttttgtttaattagctgttagcaacgcaaactgtttcaggttgttttctggcactcataaacaccagcaataatgccagtcccgcgacaatcgctcccatcaccggcacaaagctgtatcccagcccagcggaaattaccgcaccaccagcagctgctcccagcgcatttccaagattaaaggcaccaatattgacactactagacagacctggcgcttcactggcgacacgcatcacgcgcatctgtaacggcggtacgaccgcaaaggttgctgcgccccacaccaccatgctaatagctgcgccgaactcattgcgggccaggaacgggattgccagcataatcaccatcaacaacaacaaaaagcctttcaacgtgccgttaacactacgatctgccagtttgccgccgagatagttaccgatagagaatccgacaccaatcagcaccagcattgccgtgacgaacaccggtgttgcgtgggtaatactttgcagtaccggagagatataggtgtagagagtaaacattgcaccagctcccagtaccgtcgtcagcaatgcagacagcacctgcggacgcattaataccgccagctcttttttcacttcaggtcgtgcccctgcaccacctttaggtaaactgaagaacagacttaccatactaatcactcccagccccgccgttgccagaaaactcatccgccagccgatggtttcacccaaccaggtcgccgccggcacgccaccgatatttgccagggttaaccccataaacatagtggcaactgcgctggcctgtttatgttttggcaccacgcttgcggccacgacactacccaaaccaaaaaatgctccgtgattcaggctggtcaaaatgcgactaagcatcagggtcatataatccggcgcgatggcggaaagtacgttgccgagcgtgaaaattgccatcaggaaaatcaacgcactgcggcgggcacgatgagaaagtagaagcgtcatcagcggcgcgccaaccattacgccaactgcataggcactgattaacattccggcagcgggaatgctgacatccacaccgcgcgcaatgacgggcaacaagcccattgggctgaactccgttgtcccgataccaaacgcgccaatcgccagcgccagcaacggatagttaattttcatgccttatctccacctcttcgcgtcattacgcgatattcattaaagtggcgaaagcatgacagcaatcacaaaaaaatgaaaataacaaaaagagaaaacacttttgccattttgctaacaaacaggaaggagatgcgagggagaacgcgctccctcgagaggaaatcagtgcagcgcggcagtcaaacccacggctacgatcaaaccgaggacgataatcgttgttaccagtgaaaatttaaggtcggtgctcatcaagttttctccttttttattaccacacaaaaagtgatattacgcatttttacacactgtgatgaaaaaatctcccgtcatttataatgataagtgtttttaccacttccccttttcgtcaagatcggccaaaattccacgcttacactatttgcgtactggccattgaccccttcctgacgctccgtgtcgtttttccggcgtaccgcaacacttttgttgtgcgtaaggtgtgtaaaggcaaacgtttaccttgcgattttgcaggagctgaagttagggtctggagtgaaatggaatggcaacaataaaagatgtagcgaaacgagcaaacgtttccactacaactgtgagtcacgtgatcaacaaaacacgtttcgtcgctgaagaaacgcgcaacgccgtgtgggcagcgattaaagaattacactactcccctagcgcggtggcgcgtagcctgaaggttaaccacaccaagtctatcggtttgctggcgaccagcagcgaagcggcctattttgccgagatcattgaagcagttgaaaaaaattgcttccagaaaggttacaccctgattctgggcaatgcgtggaacaatcttgagaaacagcgggcttatctgagcatgatggcgcaaaaacgcgtcgatggtctgctggtgatgtgttctgagtacccagagccgttgctggcgatgctggaagagtatcgccatatcccaatggtggtcatggactggggtgaagcaaaagctgacttcaccgatgcggtcattgataacgcgttcgaaggcggctacatggccgggcgttatctgattgaacgcggtcaccgcgaaatcggcgtcatccccggcccgctggaacgtaacaccggcgcaggccgccttgccggttttatgaaggcgatggaagaagcgatgatcaaggtgccggaaagctggattgtgcagggtgactttgaacctgaatccggttatcgcgccatgcagcaaatcctgagccagccgcatcgccctactgccgtcttctgtggtggcgatatcatggcaatgggcgcactttgtgctgctgatgaaatgggcctgcgcgtcccgcaggatgttagcctgatcggttatgataacgtgcgcaacgcgcgctattttacgccggcgctgaccacgatccatcagccaaaagatagcctgggtgaaacagcgttcaacatgctgttggatcgtatcgtcaacaaacgtgaagaaccgcagtctattgaagtgcatccgcgcttgattgaacgccgctccgtggctgacggcccgttccgcgactatcgtcgttaatcacccgttgcgggagtctcttccggctcccgcagccactccttattcagcgtctcactatcgccgagatactcaagcaaccaggttaacgcagggctcatatcattttgctgccatgtcagacaacatgcgctatccggaaaggggttttccagttctaatgctacccacttcccctcattaagccacggtttggcgaaatgtgttggcaccatccctatgcataatcctgcgctgatacaggttgcgctactttcccagtcaggcacgacaactcttttttggttatccagcaaccaggtaatacgtttaggtagcgttcggctggtgtcttcgcgcaccaagctcggccagttgcgcaacgtatcatcgctgaacgggccatccatcaacgccagcgggtggtgactggcaacaacgcaactccagcttagcatccccatatcccggaaggcataacgaccgcctaccggaatcgcgcgtgttgcgccaatcgccagttccacgcgcccgtcggaaagcgcatcccagacaccgttgaacacttcctgaaagacaagaagttcgacatcatcaaaatggcgataaaaatcaacgatcatctgccgtgtacgttctggcctgacaatattatccactgcgatagctaactgaccgcgccagccgttcgctatctgctgacattgctggcgggtgatctgcatttttttgacaacagagcgcccttctttgagaaaccacgctccagcagcggtcagctccacatcacggtgccgtcgttcaaagagcggcaccgccagccactcttccagctgacgcacggtatagctgaccgcagaaggaacgcgatgcagctcctgtgccgcagcgctaaaactaccattacgcgctaccgcatcaacaacttcgagactatattcactccacatagtctgcctgcaaaatttttgaaaccagtcatcaaatattaccgtttcacaacactaatttcactccctacactttgcggcggtgtttaattgagagatttagagaatatacatgcaacctgggaaaagatttttagtctggctggcgggtttgagcgtactcggttttctggcaaccgatatgtatctgcctgctttcgccgccatacaggccgacctgcaaacgcctgcgtctgctgtcagtgccagccttagtctgttccttgccggttttgccgcagcccagcttctgtgggggccgctctccgaccgttatggtcgtaaaccggtattattaatcggcctgacaatttttgcgttaggtagtctggggatgctgtgggtagaaaacgccgctacgctgctggtattgcgttttgtacaggctgtgggtgtctgcgccgcggcggttatctggcaagcattagtgacagattattatcctagtcagaaagttaaccgtatttttgcggccatcatgccgctggtgggtctatctccggcactggctcctctgttaggaagctggctgctggtccatttttcctggcaggcgattttcgccaccctgtttgccattaccgtggtgctgattctgcctattttctggctcaaacccacgacgaaggcccgtaacaatagtcaggatggtctgacctttaccgacctgctacgttctaaaacctatcgcggcaacgtgctgatatacgcagcctgtagtgccagtttttttgcatggctgaccggtagtccgttcatccttagtgaaatgggctacagcccggcagttattggtttaagttatgtcccgcaaactatcgcgtttctgattggtggttatggctgtcgcgccgcgctgcagaaatggcaaggcaagcagttattaccgtggttgctggtgctgtttgctgtcagcgtcattgcgacctgggctgcgggcttcattagccatgtgagcctggtcgaaatcctgatcccattctgtgtgatggcgattgccaatggcgcgatctaccctattgttgtcgcccaggcgctgcgtcccttcccacacgcaactggtcgcgccgcagcgttgcagaacactcttcaactgggtctgtgcttcctcgcaagtctggtagtttcctggctgatcagtatcagcacgccattgctcaccaccaccagcgtgatgttaagtacagtagtgctggtcgcgctgggttacatgatgcaacgttgtgaagaagttggctgccagaatcatggcaatgccgaagtcgctcatagcgaaagtcactgatctatatcgatatacttatacttaggctgctaacaaaattttgttgtatgattgaaattagcggcctatactaatttcgagttgttaaagctacgataaatattatgtttttacggggacaggatcgttcccgactcactatggatagtcatttcggcaagggttcctcctttccctctgttctacgtcggattatagactcgcggttttttctgcgagatttctcacaaagcccaaaaagcgtctacgctgttttaaggttctgatcaccgaccagtgatggagaaactatgagtagtagctgtatagaagaagtcagtgtaccggatgacaactggtaccgtatcgccaacgaattacttagccgtgccggtatagccattaacggttctgccccggcggatattcgtgtgaaaaaccccgatttttttaaacgcgttctgcaagaaggctctttggggttaggcgaaagttatatggatggctggtgggaatgtgaccgactggatatgttttttagcaaagtcttacgcgcaggtctcgagaaccaactcccccatcatttcaaagacacgctgcgtattgccggcgctcgtctcttcaatctgcagagtaaaaaacgtgcctggatagtcggcaaagagcattacgatttgggtaatgacttgttcagccgcatgcttgatcccttcatgcaatattcctgcgcttactggaaagatgccgataatctggaatctgcccagcaggcgaagctcaaaatgatttgtgaaaaattgcagttaaaaccagggatgcgcgtactggatattggctgcggctggggcggactggcacactacatggcatctaattatgacgtaagcgtggtgggcgtcaccatttctgccgaacagcaaaaaatggctcaggaacgctgtgaaggcctggatgtcaccattttgctgcaagattatcgtgacctgaacgaccagtttgatcgtattgtttctgtggggatgttcgagcacgtcggaccgaaaaattacgatacctattttgcggtggtggatcgtaatttgaaaccggaaggcatattcctgctccatactatcggtagcaaaaaaaccgatctgaatgttgatccctggattaataaatatatttttccgaacggttgcctgccctctgtacgccagattgctcagtccagcgaaccccactttgtgatggaagactggcataacttcggtgctgattacgatactacgttgatggcgtggtatgaacgattcctcgccgcatggccagaaattgcggataactatagtgaacgctttaaacgaatgtttacctattatctgaatgcctgtgcaggtgctttccgcgcccgtgatattcagctctggcaggtcgtgttcagtcgcggtgttgaaaacggccttcgagtggctcgctaaaggctattctatcgccccctctccgggggcgatttcagatcaggcttctgtgcctggttgattcatggcattttctcgtgccgccagcacacgttctaccgtatctaccactgcctgagtttgtggatcgatttcaatgttgacgcgtgcgccaagttttttcttcccaagagtcgtgcgttccagtgtttcccgaattaaatggacgcaaaaacgcgttggcgtgacttcgccgacggtcaggctaataccgtcgatgccaataaatcctttgtacagaatatatttcatcaactgactatcctggactttaaaccagatctggcgattattttcactggttaatattttcgccacttcagcagtggtcataatatgaccactcattaagtgtccgccaatttcatcactgaatttcgccgcacgctcaacgtttacccaatcccccacttttaaatcgccaagattggtaatgcgtaacgtttctttcatcaggtcaaaactgacatggttgccgttaatttccgtcacggtcaggcagcaaccgttatgcgccacggaagcaccggtttccaggccgtccagcatgtggtcgggtaactccaccacatgcgtacgaaaatttggtttctcgtcaatgctcaccagttttgcggtgccctgtacaatccccgtaaacatacttacaactcctgaaatcagttaagacattctgttcagcacaatagcaggtggaaaacgcccttaccagtgaaggggtaagaatggctattttttcactggagaattaataaatcctcgctacaatagactgaatttcccctgcttcttctttttgctgcccattcaggcggctttttagtctctcatataactacaaataaaaggtgttcacgtgcagaagtatatcagtgaagcgcgtctgttattagcattagcaatcccggtgattctcgcgcaaatcgcccaaactgcgatgggttttgtcgataccgtgatggcgggcggctatagtgccaccgacatggcggcggtcgctatcggtacttctatctggcttccggcgatcctctttggtcacggactgctgctggcattaacgccggttatcgcgcaattaaatggttccggtcgacgtgagcgcattgcgcatcaggtgcgacaaggtttctggctggcaggttttgtttccgttctcattatgctggtgctgtggaatgcaggttacattatccgctccatggaaaacatcgatccggctctggcggacaaagccgtgggttatctgcgtgcgttgttgtggggcgcgccgggatatctgttcttccaggttgcccgtaaccagtgtgaaggtctggcaaaaaccaagccgggtatggtaatgggctttatcggcctgctggtgaacatcccggtgaactatatctttatttatggtcatttcggtatgcctgagctcggtggcgttggttgtggcgtggctactgcggcggtgtattgggtcatgttccttgccatggtttcttacattaaacgcgcccgctccatgcgtgatattcgtaacgaaaaaggcaccgcaaaacccgatcctgcggttatgaaacgactgattcaactcggtttgccgattgcgctggcactgttctttgaagtgacactgtttgccgtcgtggctctgttagtgtctccgctcggtattgttgatgtcgcaggacaccagattgccctgaactttagtagtctaatgttcgtgcttccaatgagcctggcggcagcggtaactatccgcgtaggttatcgtctgggtcagggcagtacgctggatgcgcaaaccgctgcgcggaccgggcttatggtgggtgtctgtatggcaaccctgacggccattttcacggttagtctgcgggagcaaatcgccctgttgtacaacgacaatcccgaggttgtaacgctggctgcgcatttgatgttgctggcggcggtatatcagatttctgacagtatccaggtgattggcagtgggattttgcgtggttataaagatacgcgttccattttctatattacctttacggcttactgggtgctgggcttgccaagcggctatattctggcactgaccgatctggtcgttgaacctatggggccagcaggcttctggataggctttattattggcctgacgagcgcagccattatgatgatgttgcgtatgcggttcctgcaacgtctgccgagtgccatcattctgcaacgagcatcccgctaataaagacaaggcgcaaccttcacgggttgcgcctgtatttttacgcaggctggagcgttgcgccaatcccgtcttcgtctggctgtaatttcagagcgttacacagagtttgccgactggcatctgttatctcaacgtgtatatccccggtaacttcccctttcacattgatgaagtcaggactaatttcttttgcactggtttgcaggcaaatcgctccctctccgcgcaggcgtttcactttcagttgcacatgcgttgccgcatcagtgatcagccacagttttccaccattcagattgatgttaccaacaatgaaagtgacactgtcaccttttaccgtactgccgtctagaatcaacacaccgccctgctgtacagtaatcgtactttgttgcagctctgcgccataaccaataatcatactagcgccgtccagtaatgcaacactcccggtcagttcaaccggtgcgcgatcttcctctacgacaaaattttcgtccgcgctggtgggactcaacaggatcactgtcccaccttgtattaccgcgttttccagcgtaccggcatgcacttcagcccgaccacccacattcacggacaggttttgcgtcttaccggaactgtagagctgaaggccatccgtccccagacgataaatggatccattctcaacaatagtgtcagagtcttcaccaccgagattattcatggtgccaccagcaagcaacgtatcactggctttcccggccagcataaaaacgccgccctgattaatctcacaattgctggcttccccacctggatacaccaacaattcaccaccttcatctaccacgaccgcactggttgtcccattaaccaacaggccgccctcttgatcgagaatgattttttccgcgcgatgtccttccagtacacgcaggttaccgccattttccagcaacaaaccgcaggcataacctttatcaacgctgaattcaccttcgggatggcggccattaaccgtagcgagcgtagagagactaattgcgcctccctcggactgaacaatatctgtggcaatggcaccatcgctgacgcttagcgtgccattgttaccgtactgtgtgcatttggcgatcccaccggttgccactttcaaccagccagcccccgtgaccacggtattttcggctcttccgccagcttcaacaatcaactcgccttcagtaagttgcgtcgcgccaatgacctcgccggtcttaacaatttgcacgttcccgtcgctcatcaagtttttcgcatcagatcccatgatttattcctttgctgcatctgtgtgcctttattgctacctaagtgtaaaggctacggaggatttatccacgacagatttgagatggtggcaaacaactctgtttaaactctgatacacgaattattgggttgtatcagatgtaaatgcgatcctgaataaaaatcacccttgcaaatcaacaaaatatagccaatttgcttaaaagctctgcaaacggtcgaaatagcgcagaaaattacgttttgcctcttgccaccttcccactctgccgctaatattcgtccccgttgtcacctacaacgttgcgttcatagctcagttggttagagcaccaccttgacatggtgggggtcgttggttcgagtccaattgaacgcaccatcctgcgtccgtagctcagttggttagagcaccaccttgacatggtgggggtcggtggttcgagtccactcggacgcaccagattttcttaatctggtcttctcctttttccctctgtttcttctctgtatccaatacgttaaaagatttacactgtcttcgtatgcgttatcagaaggagaatcgctatggcaactttgttacaacttcattttgcttttaatggcccatttggcgacgcaatggctgagcagcttaaaccacttgctgagagcattaatcaggaacctggttttctgtggaaggtatggacagaaagtgaaaagaaccacgaagccggtgggatctaccttttcactgatgaaaaaagcgcccttgcctatctggaaaaacatactgcccgactgaaaaatctcggcgttgaggaagttgtcgccaaagttttcgatgtcaatgagccacttagtcaaatcaatcaggcaaaactcgcctgacagaatttaatcaagggcggttagcgcccttttcatccctgtctgaaatttctcaaattctaaaaatctcaaccaaacttatctgataacactaaattcgaaagaatgcgtacaggtaagtaacaatgaaaaaaattgctattgtgggtgccgggcctacggggatctacaccttattcagccttctacagcaacaaactccactttctatttctatcttcgagcaggctgacgaggccggtgtcgggatgccatacagtgatgaggaaaacagtaaaatgatgctggcaaatattgccagtattgaaataccgccgatttattgtacgtatctcgaatggctacaaaagcaagaagacagccatctccagcgttatggcgttaaaaaagaaaccttgcacgatcgtcagtttttaccgcgaattctgctgggcgaatatttccgcgatcaatttttacgactagtagaccaggcacgacagcaaaaatttgcagtggctgtttatgaaagttgccaggttaccgatctgcaaattacaaatgctggcgtcatgctcgctacaaatcaggatttacccagcgagacgtttgatttagcggtgatcgccacgggtcacgtctggcctgatgaagaagaagcaacccgaacgtattttcccagcccgtggagtggcctgatggaagcaaaggtcgatgcgtgtaacgtgggtattatgggaacatccttgagcggactggatgcggcaatggcagtggctattcagcatggtagcttcattgaagatgataaacaacacgtcgtttttcaccgcgataacgcaagtgaaaagctaaatatcacgttgttgagccgcacgggtattttacccgaagccgatttctattgccctattccctacgagcccttacacatcgtcaccgatcaggcattaaatgctgagattcaaaaaggcgaagagggccttttggatcgggtatttagattgatagtagaggaaatcaagtttgctgatccagactggagtcaacgcatagccttagagagcctgaatgtcgattcctttgctcaagcctggtttgccgagcgcaaacaacgcgacccatttgactgggcagaaaaaaatctccaggaagtcgaacgcaataaacgagaaaaacatactgttccctggcgttatgtcattctgcgcctgcatgaagccgtacaggaaattgttccacatctgaatgaacacgaccataaacggttcagtaaaggccttgcccgggttttcatcgataattatgcggcaatccctagtgagtctattcgtcgcctacttgccttacgtgaagcgggaatcattcatattctcgccctcggtgaagactacaaaatggaaattaatgagagccgcaccgtcctgaaaacggaagacaacagctacagctttgacgtttttattgatgcccgcggacaacgtccgcttaaagtgaaagatatccctttccctgggctacgcgagcaattacagaaaacaggggatgaaatccctgatgttggcgaagattatacgttacagcaacccgaagatattcgtgggcgcgtagcgttcggcgcgttgccctggttgatgcacgaccagcctttcgttcagggacttacggcatgtgcagaaattggtgaggcgatggctcgggcggtcgtaaagcctgcatcccgtgctcgtcggcgtcttagctttgattaaaggtaaagctatcagcactcaacaaactgatgctgttcattaagacgatagcggactccggctcgaatattgttttcaccttcaatggcgacggcgaagcgaactctttcgccgtcatgatatgccagtgcggcgcttcctcctggcccgagaataatactgtcgaccacgcccgtgctcactaccgtactattttcaccgctggcaatgatgtgtacattgtcgccgctgttggcaattctggcgtttgcgccaaagctggcgatttgcaccaggtcaccattactggcgacatgacaccgttcacccaatgtacaaacgcgtactcgcattccggtattcgcaatccgactgctatctccagcgctgcttatccggctagaattaccggttacagcaacccgtgcgcgttcaccggagctgccaatgtgactgttaaagccgacacttccaatccgcacgctataacccatactggcaatttgcgcggcatacccagcggttgcgattctggcgttatcctcacaacagccgatgcgagcatgatcgtcgctgcgggcaaactgactgcaaaatggtctctctccggggtctgtggccagtttttgcatagaggaaacttcctgatgcgcgaagttttcatccgccagccattttttccacgcatactcaaccagactctccgcccagtccgtatatccttcctcaatcagtgcatgatgaatatcggcataactaccgccgcgtgggaaatggcgcaggaaccagcgatacatcaccgctccgatacgccattctcgcaggtctgcttgtgtaatgatcattcgttagtgccggtgatagccatcgaccatgcttttaaaggtttcgtgtggcgtacgccccgtggtgcaaagataaagatgaccgaagataaaaaagaggcttataaatgccagagcaaaatgtgtctgcaataaccagtatcttacgccaggaaacacatctcccacggcttgcggatagagacacagcagccccgtcaatagtaacaacggcagcaatccatacatgacaccaacataggcgacctgctgtaagggattaaatttagactgggttgttgccgggaaaggatgttcttccccctgcataatgccaaacaaataaaatcgcgtttgttttgccgctcgttccagccacccctgacgacgaatgcgatagtggtgaccattatccccaacggcattgatcagcacaaagccgagccagcatgccagtaacaaaaatccgcaaacttcatgcaccgcaaccagacttttaaccgcagttgcgcccaccatcgcaaagtgatttatcagcccactggccagcaacaatacaaagagtaacgcattgctccagtgccataatctgaccgctttgctgtaaagataaatcttctcaccatgatcggtggcacttttcttcacgccacgagcacgaagcaaggcatgcagccccagcaccaaccacatcccaaccagcaatactccggcaatgatcaaccacaccggccaaaattcgggagtgaactgtggcacatagttcgctaactggctctgaaactgttcagcatgttggctcgggttcatacattttcctttttaatcaaatgttgaccgaaccggcgatacagatgcggtttcccggcaccaggtagctgatattgatagtatttattttgctgcaaccacgcctgaatttctgggctatcttcgcgaccaaagatcaatgcgtgttccgggcaggcgctgacgcaaatgggcggaaagccttttgccagtcgggactcagcgcagaaatcacatttatctgccactttagtgacagggttaaggtagcgaacctggtacggacaagcgccaatgcaataactgcagccgatgcactggcttttttctacccgcacgatcccctgctcatcacgccagctcgcccccgtcgggcaaacgtcgatgcacggagcatcttcgcagtgctgacaactctggcgaaaaaagtgatactgcgtttcgttgtcgttatcggtgactggaatgtgtgctatgcttaaacggcttccctgagcggggacgtggttagttttacggcatgcgcgggcgcaaatattacagccattgcaccgactctcgtcatgaatcatggcataccgaacttccttttcttgcctcgtgttcgctaacagagaagacgcagaaccagtaaaaaagattactgttcccatccccagaacaaatttgcgtcgagtgaaggacatctgattatcccctaatgcagtggctgcaactgtccaccctatccatgacatctccctgaaatttcaggggttctgaaactgctctacctcgaaccattcgcataagccataagccttgccataggtcataaatcgctcgctaaacaagtacaacaccgccgtgctactctccacctgccgtatatcggcatattcaggtgcaacatccatcgcggcgatcgcggcttcaatctgcgcttcctggaagtaatatggcgcttgcatcagcatggcgactttgtaaggacgaggatacgtctggcactcaaaacgaacggcgtgtgcaatggcgcgacaaatgtcctgctccacaacttgcaaagacatcgccgcgtagttttcactcatggcctgcgtactgtaatagtaatcatccttgcttcccgtcaaacaagcgatatccgcgtagtctccgttctgcttaatgctttccagcaaaacactcagttcctcttctgcaaccaaatagggtgggctgagaaacacggcgcgcgccaccagctgcccagccgcagaatgctggcgaatgaactcagccaggatttcagcaggttctggttcggttaccgtatcaacggggtgacgcatcccctgcaaccattgccgcttcgcctcgtcaacttcgctgactttcgctaacggcaattcatcctgatggttcatcttacccattccttacgcaggcagtagattgtgtgctgccagatcggcggcaatatcttccagccccagacgctgcaatgtttcgcgggttggacaaccaagctgtgggtcccagcccatttctttgtagaacatcgtgaggctagcatgcatatcgtcacgatccattttgtcagtaccttcagtaaagaccgggatctgcggatccttgtcgaatacccaggaacagataagatcgtgttcattacgcatatctttggtttgcatcagttttaccgtgtaggcacgatgcaacgtaaaaatacgctctgcagctaaatctaatttttcctgagtcatctcttcgccggtgatcgctttgaagaatttggcttcaagcgccagatcgccccggtaattacggcttttcagcgggctaacggtcattggccagacccagttgcacagggtgacggcgttatgcaaacagacccgcaacaggctccactttgcatatttaatttttgcgtcattgattggcgtgtagtttttggtttcatcgtaagcatcttcagaaccaaaaagttctttcgccacttcacgttgcagtttcaatggcaagccggaaccaataaagttgatatgggtatgcgtcatgcagtcacggttgaacatacagttaacaatggaaccgacctgcgcactcgcttcattggcatggtgaaccggatagccaaacgggctccagagtttatttttcgcgtagccccagtactcttcacccaaattccagcgttctgcgatggcataactaccatcagccaggtgactcagctcacccacacgatgcgccagacggtagtaaaaatctttaatgaagttaacgtcacccgcttccagttgatcccagcgaatttctgcatactcttcagctggcagaacacgcttgaacacacctttgctgtaacaataagtaaagtcgcgatgcaactgcccgtagttacaccataggccgtagtcatcgaacaaattcagacccaccaggttaccaatcacacgaccatcgtctttatcttcaaaatctttcggcccgttcgggaagatggtggtatggacaaagtttgctacacaagtgttaccacctgtgctgggcacgccaaactctttcacccgaggaatattcatttgggtcatacaacggatcgggcaagagtggcagccgctcatttttactgtgtatttctctgccgccggtcctaagtcaaaaacggatttataggtacgaaagccgaccgtattctgattgcctggcggaatttcacccgtttcaatcggaccaccttcagccgcgccccaaaacagccctttacgtgctgtccagcgactcttgggatcactatactctgcccagctttgtggcgtacttggcacgacatggttgttattcgcaccaataagttcagtcatcatgtaatcattgagacgcttcatctcctgacgatcggcaatgttgacccctttcgtcccttcaaccgcaatcgctttcaggtttttgctacccattattgcgccagttcccgcaccgccgctgtggttacggctattcaacatgccagagagaggaacaaggttttccccagcctgaccaatagccgccacacaggtttccggactggtcaatcgacaaatttcttccgtcgttgcgcgcgtcccttttccccataagaaatcggctttttccaggctaactttgtcatctttaatcttcagccataccggacttttcgccttcccttcgataataatgacgtcgtatccagcgaatttcatttgcgctgcaaaaaagccacccatatgggcatcgacgactaaatttcctttggtaaaagtagaaagactggtgatatttacgcgagaactacagggggcaccagatccagttaatgggccggtagcaaagactaatttattcgcttcatcgaaaggtttcgtgcctggcggtacttcgtcatacataattttgtagccgaagcccatgccaccgacaaaacttttaaacttactggaatcttcgagggtaatatttcctgtcgtgagattgactcttaatatattacctgtccaaccgttagccatgattttttcctttgcaagattcacacagtaatatctttccactcgataatttttaacgcccctgttgggcaggcgtttgcgcattcaccgcataacacacatttgctggattttttactttcggtatttacggtggccatcatccacgggcatgccgtagtacaggcgctacagccaatacagcgtttatgatcgacggtaatacagccttctttctgctgccaggtaatcgcaccaatcgggcagacgttcatgcattgcggctctttgcattgacggcaggtgtccgcggtatagttgagatcgccatacaggccgccgccagagccaaccccgttgtcgccaaagaaataattgcgatggattttgatacgggagaagaatgtccctacactgccatcgttgaagttggtacaagagatttcacagcggtggcaacccgtgcatcgcgctcgctgggtcaccagcacccctttgggggtatttatcaaccctactgtgccgctatcaatatcttcctgtttgcaacccaaaagactcagtaacgcaggggcaattgttagaccagcaaggccttttccacttatacgcaagaattctaatcgcgttaagccaatatctaatagtggacgatcaaccgggttcatttatttcgcatcctcttcgcaaacacagtgctgacaattcagcagcctgatattaagcattcaactaatacgctgctgactctgtccccaacaccagatattttccctaacccgatagtgtatgagaaaagattaacgccgataaactaatcctttatggttaggagaaaaaataatgtgattattctgagcccttaacattgatcgttatcaattaaaattacaaagcaagaaattataagtgaactgatatttattatcatttgaaataaatttaacttaagcgacaattatttgtgactttcattgcagaaaataaaaataacattatcgctataaattaaaatacataccgaaattcgtataatttcagcagttgttatttagaatgattaactggaccgcaactgaagcaagaatatcaggatgaagcttaccgcctcatcctgaatggtcattttaccagtgcgttaatgacggtttccatcgcctgcttttccagctcactgcgctgaatgcgtttattggctaatgctgtacgtaatacgcctgcgataacaatatgctttggttcctgccccagatcgcgcatttccagcacaactttaccgacaactctgcacatttctcggtacagttcatcctcttttgtccgatttcccattctttatacctatttatcatgccaactatcagcatatatcaatctaaccaattaaacaaaaatcaaacaaaatcagacaaataacgcgataaattattttaactgtagcaattgagcgatgatatatttatacaccggatgaactttcacttatcctcacactgacaacttcggcaccagacgttgcgcaaacagtgaagtttttgcgtaaccttttccctggaacgttaaatctttgataacaatttattgtctaacaagttgtatattttttgaaacgctgtttttgttttccttttggattaatttcagcgtataatgcgcgccaattgactcttgaatggtttcagcactttggactgtagaactcaacgactcaaaaacaggcactcacgttgggctgagacacaagcacacattcctctgcacgctttttcgatgtcacctatccttagagcgaggcaccaccactttcgtaataccggattcgctttccggcagtgcgcccagaaagcaagtttctcccatccttctcaacttaaagactaagactgtcatgaaaaagaccaaaattgtttgcaccatcggaccgaaaaccgaatctgaagagatgttagctaaaatgctggacgctggcatgaacgttatgcgtctgaacttctctcatggtgactatgcagaacacggtcagcgcattcagaatctgcgcaacgtgatgagcaaaactggtaaaaccgccgctatcctgcttgataccaaaggtccggaaatccgcaccatgaaactggaaggcggtaacgacgtttctctgaaagctggtcagacctttactttcaccactgataaatctgttatcggcaacagcgaaatggttgcggtaacgtatgaaggtttcactactgacctgtctgttggcaacaccgtactggttgacgatggtctgatcggtatggaagttaccgccattgaaggtaacaaagttatctgtaaagtgctgaacaacggtgacctgggcgaaaacaaaggtgtgaacctgcctggcgtttccattgctctgccagcactggctgaaaaagacaaacaggacctgatctttggttgcgaacaaggcgtagactttgttgctgcttcctttattcgtaagcgttctgacgttatcgaaatccgtgagcacctgaaagcgcacggcggcgaaaacatccacatcatctccaaaatcgaaaaccaggaaggcctcaacaacttcgacgaaatcctcgaagcctctgacggcatcatggttgcgcgtggcgacctgggtgtagaaatcccggtagaagaagttatcttcgcccagaagatgatgatcgaaaaatgtatccgtgcacgtaaagtcgttatcactgcgacccagatgctggattccatgatcaaaaacccacgcccgactcgcgcagaagccggtgacgttgcaaacgccatcctcgacggtactgacgcagtgatgctgtctggtgaatccgcaaaaggtaaatacccgctggaagcggtttctatcatggcgaccatctgcgaacgtaccgaccgcgtgatgaacagccgtctcgagttcaacaatgacaaccgtaaactgcgcattaccgaagcggtatgccgtggtgccgttgaaactgctgaaaaactggatgctccgctgatcgtggttgctactcagggcggtaaatctgctcgcgcagtacgtaaatacttcccggatgccaccatcctggcactgaccaccaacgaaaaaacggctcatcagttggtactgagcaaaggcgttgtgccgcagcttgttaaagagatcacttctactgatgatttctaccgtctgggtaaagaactggctctgcagagcggtctggcacacaaaggtgacgttgtagttatggtttctggtgcactggtaccgagcggcactactaacaccgcatctgttcacgtcctgtaatattgcttttgtgaattaatttgtatatcgaagcgccctgatgggcgctttttttatttaatcgataaccagaagcaataaaaaatcaaatcggatttcactatataatctcactttatctaagatgaatccgatggaagcatcctgttttctctcaatttttttatctaaaacccagcgttcgatgcttctttgagcgaacgatcaaaaataagtgccttcccatcaaaaaaatattctcaacataaaaaactttgtgtaatacttgtaacgctacatggagattaactcaatctagagggtattaataatgaaagctactaaactggtactgggcgcggtaatcctgggttctactctgctggcaggttgctccagcaacgctaaaatcgatcagctgtcttctgacgttcagactctgaacgctaaagttgaccagctgagcaacgacgtgaacgcaatgcgttccgacgttcaggctgctaaagatgacgcagctcgtgctaaccagcgtctggacaacatggctactaaataccgcaagtaatagtacctgtgaagtgaaaaatggcgcacattgtgcgccattttttttgtctgccgtttaccgttactgcgtcacgcgtaacatattcccttgctctggttcaccattctgcgcactctctacactaggcgcattgctggctgcgggagttgctccactgctcacgctaaccggataccctgcccgacgatacaacgctttatcgactaacttctgatctacagccttattgtctttaaattgcgtaaagcctgctggcagtgtgtatggcattgtctgaacgttctgctgttcttctgcgcttagtggtcgatgtacttcaacataacgcatcccgttaggctccacggaatatttcaccggttcgttgatcactttcaccggcgttcccgtccgcacgctggagaacaaggctttaatatccggtgcattcatgcgaatacacccactactgacgcgcaaaccgacgctgtccggcgcactggtaccatgaatgaggtattcgccattaccatgcgcgaggcgcagtgcgtaacgtcctagcgggttatttggtccggcaggaacgactggcggtaatttaatgccacgctccaggctacgctgacgaatgcctgccgtaggcgtccaggttgggttagggattttctgcccaacacgcgtttccatcaccggcgtttccagcccctgcaatccaatacctattggataaacctgcacaatattttctcccggcggataataataaaggcgcagctctgcaaggttaacgataatcccctgacgcggtgcatcaggtaataacagttgactaggaatagttatcgtcgtaccaggttttggcaccggggcgatagtgttattggcttcaaggatcaacattgccgcagtatcaaaacgtcgggcaatagcctgaaggtttttatccccttcttgcaccgtatacgtttgattttgcccaaccagtcggcttccggttggtggtagcggataatcaaccgcccaggcagcctggatggcgctaaaagcgccgataagcgtgagtgtaagcaaagacgcgcgtttcattgtaaacctcctgtatttgccggagactcacgctgaaacgtcggatggcgcttatgttcacctgaaaccaaaacactcctgtgcaggtcagtgtaaacattgaccatccggcaatgtgagccaaccggatgaaagctgtccttttagtttagctaagtgcagcggctttggcgcgaattgcgcgaatcatcgcttccagaccttgactacgagatggggtgagatgttgggtgagcgccattttttcaaaccacggacgcacatcgaaattgacaatatcctgcggcgtcatctgatcgtagagaataaagacgaccgcaataagccctttcacaatcgccgcatcgctgtcgccctgtaattcaataattccctgggcattctggcgcatgacaatccacacctgactctgacagccctgaatgctattttgtggacttctgtcttcgtcgcgtaattctggcagacgctggcccagctcaataatgtagagatatttctcttcccagttggcgcagcgtaaaaaattacgcagcaacttttctttatccggcaataaagccatagtgcctccctgttatcccagcaaacggtgaatacgttgcaggccggtcaccagacgatccacttcttcatgggtgttatacatggccaggctcgcccgacacatcgcagggacgttgtaataggccatcaatggcattgcgcagtgatgtccggtacgcacagcaatgccgtaattatcgagaaaactgccaacatcataggcgtggtgtttaccgagattaaaagcaataacgccaagcctgttttgtgggccatagagagtgagatccggtacagattccagctgacttagcgcataatgcatcagattctgttcatactcggctatgttattaagccccagcgcgctaacatactccagcgccgcgccaagaccaatgatgcccccggtattgggtgtaccggcttcaaaccgccatggtgctttggtccaggtagtgccttcactcaggctgacggtggcgatcatagaaccgcccccttcccacggcggcatctcctgcaacaaggcttctttcacataaagaatgccaattccggtggggccatacagtttatgcccggagaacacgtaaaagtcgcaatccagcgcctgaacatccaccggatgatgcatcaccgcctgagcgccatccaccagcacttttgcgccatgctggtgcgcaagcgtgatcatttccgccagtggattttctgtgccaagcacgttggagacatgagtaattgccagcaggcgagttttctcatcaaacagcgtaggcagcgtctccagttgcaacgtaccatcgggattgagcgggatcacacgcagctctgcgccaacgcgtgcgcaaagcatctgccagggaacaatgttagcgtggtgctccatctgactgatgatgatgttatcgcccgcccgcacgttgctgttgccccagctattggcgaccagattgatcccttccgtcgtgccgcggacgaacaccagctcttccgcgctacgggcattaataaacaggcttgcccgcttgcgcacgttctccattttctcggtcgcctgggcgcttaaggtatgaataccacgatgcaccgccgcgtagccatgacgataaaactcggcctcggcgtcaatcacctggctcggtttctgcgcactggcggcgctgtcgagataagccagcggcaaaccgtttacctcacggctaagcaccggaaagtcggcccgcactttgtcgacggaaaaaatcatcttgcacctcctggcagccgttgaccgattcgggccagcacctgctgtttaagcccctcatcacgcagtgcttccgtcagttcggcagcgaaggcgtaaatgatcatctgctgggcatcctgctgattgatcccgcggctgcgcagatagaatatctgttcatcatcaatacgccccaccgtcgcgccgtggctgcatttcacatcatctgcatagatttccagctgcggtttcgtatccacttccgccagtttgcccatcagcagattgttgttggtcatctgaccatccgttttgatggcgtgctgcgcgacgttgatcaaaccgttaaataccgcgcggcctttgtcgctgacgatagttttgtgcaactgtcggctgttacaaaaacctttattgtgttccagccaggtacgggtatcacacacctcgtttttcaccggcatcgccaggctattgatccgcagcgtgctgttttcgccattgagttgcgtactggtgttgtgtcgtaacactgcgccacccagcaggaaactgtggctaaatgcggtggcatcctcagccagcaacaaatcgttatgagcaaagtggtgactgagcgggttttcaaacgccagcttgatatgctgcaagtgggcattcgctgcgacgttgatagtgaaccgtgccccggtaaaatgacgagcatcattcaggctgacaaaatgttcgatcaccgttgcttcggcaccttccgccagatccagatgatgtcggtaatgggcagtgttcacctcttcacctgccacgccctgggtgatatgcattaacagcaatggctttgccggccgttgaccgcgcttcacggcgatatgcgtcacgctttgtgccaggctttccgtcaaatgcagaaacacttccgcctgaatagcgtcgggtaaaccctgacggtcgtcgttaatgctcacttcatatccgctgccttcagttgcatcgctcagtgcgggcacgtaacgcccatcgacaaacaccagccgcacggagtctaacgttaacgctaaggcattacgctgctgtggggatatctctcccgcaatgctgacaaactggctattgatcagcccttccagcggcgtatatttccagttttcatgtttacgtgtcggcagtccggtacgcagcaattgttgtaaatgctgctgtgcttgcggggagcgttttgtcccttcagcttcaaacaagtgatgccactgttgcagcgcgttactgctgttcggtaagccagccataaccctgctcctccagttgtttgaccaacgtgaaatcgccggatttcacaattcgtccctgatatagcacatgaacgtaatcaggcttgatgtagtcgagaatgcgttggtagtgcgtaacaatgatgaaactgcgcttgccatcacgcaggctgttcacgccatcggcgaccacttttaatgcgtcaatatccagcccggagtcgctctcatcaagaatgcataactccggttccagcaccgccatttgcaaaatatcgttgcgctttttctcgccgccggaaaaaccaacgtttacgctacgggttaataaatcttccggcatcttcaggagagcgattttctcttccatcaaatcctgaaaatcaaagcggtcgagcgtttcctggccgcgatagctgcgcaccgcattaagtgccgtttgcaggaaaaactggttactgacacctggaatctccaccggatactggaaggccataaagatgccttcgcccgcgcgatcttccgggctcagcgcaagcaaatctttgcctttgaactcaaccgtgccgcccgtcacttcataatcttctcgcccggcaagcgttgcgcttaaggtacttttgccgctaccgtttggccccataatggcgtgaacttcgccgggatgaacgtcgaggcttaatccgcgcaggatagctttatcttccacgctgacgtgtaaatctttaatacttaacatgtttattccttatccgacgctgtgttcaagactgatggcgaggagtttttgtgcttcaacggcaaattccaacggcagctcgctgaacacgtctttgcagaaaccgttaacaatcatgctgatggcgtcttcttcgctgatcccgcgttgcaggcagtaaaacagttgatcttcaccaatacgacttgtcgttgcctcgtgttccagttgcgcactattgttacgacactcaacatacgggaaggtatgcgccccacaattagcgccaatcagcatactgtcgcactgagtgaaattgcgcgcattggttgccgtcggcatgattttcactaagccgcgataactgttctgactatgtccggcagagatccctttgctgataatggtgcttttggtgtttttaccgatgtggatcatcttggtgccggtatccgcttgctgatgaccgctggtcagcgccacactgtaaaactcaccaatggagttatcgccgcgcaaaatgcagctgggatatttccacgtaatcgcactcccggtttcactttgcgtccaactcattttgctgttttcgccttcgcacaaagcacgcttggtgacgaagttgagaataccgccggtgttgttatcgccaggaaaccagttttgtaccgtggaatatttcacctcggcgtttttatggatgatgacttccaccactgccgcgtgtaactgatagctgtcacgcaccggagcggaacagccttcaatgtagctgacgtagctgtcttcgtcggccaccagaatggtgcgctcaaactgcccggttttttctgcgttaatgcgaaaataggtggaaagttccatcgggcagcgcacgcctttaggcacataaataaacgtaccatcagaggctaccgccgcattaagcgcggcaaagaagttgtcattccccggcaccacggtgccgagatatttacgcaccagttccgggtgatcgtggatcgcctcaccaaaggaacagaaaataattccctgctccgccagtttttcgcgataagtagtggcaacgctaacactgtcgaaaatggcatccaccgccacctctttgccttcccgcacgggaacgcccaactgctcaaacgccgcctccacctctttacttaaaaaggcgttcgcgccagtttgctgcaccgcgccaggttcagacgcgcaagtgtcgtcacaattaccgcagcttggtgcactgtagtagctgtaatcctgataattcagcttgtcgtagtgcgctttcaaccagtgcggttcttccatctccagccatgcgcgataggcgtttagacgaaactccagcatccactccggctcattacgcttcgcgctaattgcgcgcaccacctcttcgtttatcccctttgccagctcatcggtggctaactgggtgaagaatccttctttataattcagcgggccgccggtccaggttttgacatcgtcagttgcttcagtattacgagacatagtaccgcttataccccaaagctttcgccacagccacattcattctgggctttagggttgtgaaatttgaatatctgattaagtccttcacgaacgaaatcgacttccgtgccatcaataaacggcatcgcttgcagcgggacaaacagcttcgcgccgtcgtgttcaaacagcagatcgtctttgtccggctcgctaacactgtcgagcacatagccaaagcccgcgcagcccgtttgcttcacgcctaagcgcacgccgaccatacccggctgctttgccaccagctcacggatgtgtatcgccgctgcgggtgtcagcgttaagccttgccaggcgaaatcttgtgggttaaaggttccactatgcatgtccatcgatttacctcacttcatcgctttcagcgtataacagcatgttagtgataatgattatcagttcaacccagcaaacgcaggggctttaccgtaaaacatgctttttgcctgcttttaataagcatagaccctgatgtgtgggttaacaggcacgctaagaattaggtatctcattgttagataatggttattatctaaggagcattaaggctgtgatgaaaaagaaaaagttgtattgaaaatgactatttaagagataggtaaaaaagtgcagcgttcagaaataagaaaacccttaagtctgtgcgacacaggcttaagggtttctaccccatccggcgcttatctccggcactctcagtggcttagctcttgaaggggcgataagaataatctcataaagctaacccgccgttttaacacaaactgcgattagtattatttttgaacaatatcaggcggtagataagcagtattaagaaggtcatcgaacctggacggaggttaatccaggtcgatttggcgaacttgcggcattaagtcaggatcaatgcacgcccagacgccaggcaaagtagatttcttcttttaattcagcagaagagagagtaagcaggtcagcaaattcaagttctagttgtttcagacgtttgagatattgggcaggactaagattgctctggtcacggcgtaaaaattcaatggccagctgggtgggatcaagttgagtagacatagcatcctcgcttttagacaagacctgcacagtataccaccgtttactgtgcagataatgaccaaaagcaatatgcgtcacacttttctggtgacaacgtcacaaaatggcggtcgtcaatcgactgctacagcacaaacgccctttctcatcgaagatttcaatctgccagacctggtgacggctaccgagatgcaacggtttgcatacgccgcgcacccgcccttctcgtgcgctgcggacgtggttagcattgatttccagaccaaccactttttgctcaccttcggtacataaataaccggcaacggaaccgatactttcggccagtaccacggatgctcctccatgcagcaacccgaaaggctgctttgtccggctgtctactggcattgtcgcttcaagggtgtcatcaccaatatgttcaaagcgaatatccaggaaccccaccatgtttccttcacccatagcattcagtgcttccagggtgattttccgtttccatatcatttaataatctccagtaaagcctgcacaggatggcgtacccccgtgccttcaacccgttttacctggctacggcaggaatatccggtcgccagacagcggttacgcggcagtcgctgcatagcctgatgccaggataactcatagatcccgaggctattttcatggtttttcgcttcatgtccgtaagtccctgccatgccgcagcaacccacgctgacattttccagtttcgcgccaaaacgggcaaatatcgcggcccattgtgctggcgcacccggcaaggcggtaacttcggtacagtgaccaaagaaataccaactttcaccgctgactgtagccactggctgactctcaagtgcgcttgccagccattcattcgccagtaagacgttaaactcgccacgctcctcgcccagcgccagtttatattcatcgcgataacaaagtaccagcgccggatcgacgcccaccattggcatacccagcttcgccatacggttgaggaaatccgccgtctttttcgccgtcttcgcaaaacgattaagaaaacctttaatatgctgggctttgccatttgggctaaatggcagtaacacaggctggaaacctaatttttcgaccagacggacaaaatccgccaccacttgcgcatcgtaatagctggtaaaggggtcctgcaccaccaacactgtgcgcgctttctgctctgcattgagagattcaagctgttccagcgtcatgtttgcgctgcgatgccccaccatttgttgttgtaggctggggacgctcagcagcggcaaatcaaccatgccgatatgtttttcgctgagtttgcgcaccagcggctggttaatgaagaagttaaaggttttcggcgcgcgtgccatcagcggcgcgtagctctcgaccgtagcgacgaggtggtcgcgcagcgggcgtaaataacgggtgtgatagagctgcagaaaacgagagcgaaactccggcacatcaattttgatggggcactgggtgctacacgctttacaggccagacagccgctcatcgcctctttgacttcgtgactgaagtcatattcgcctttattcgcatgccagctattgcgcgtgcgggcaattaacgtccgcaaactgacgccggattcaggcagttcttgttccagtttgagtggatcaacgccgcgatccgccaacaaacgcagccattcacgcaccagcgttgcgcgccctttcggactatgaatccggttctgggtgatcttcatgctcggacacatcggactacgggcatcaaagttgaagcataaaccgttgccgttacactccatcgcaccgcgccactgctggcgtaccgcaatggggatctgccgatcgaatgtaccgcgcttcaccgcgtccactttcatcatcggcgcatcgagaccttctggcgggcaaatcttccctgggttgagtcggttatgcgggtcaaatgccgctttcactttgcgcagttctgcaaaaagttcctcaccgaaaaacgccgggctgtattcagcgcgaaaacctttgccgtgctcgccccacaacaaaccaccgtatttcgcagtcagcgccaccacgtcatcagagatttgcttcatcaaaatctcttgttgaggatcgcacatatccagcgctggacggacgtgcaagacacctgcgtcgacgtgaccgaacataccgtagcttaagccgtggctgtcgagcagcgcgcgaaattcagcaatataatccgccaggtgttccggcggtacgcaggtatcctcagcaaacggaattggcttagcggcacctttggcattgccaagcagaccaacggcttttttgcgcattgcatagatacgttcaacccccgccagctcacggcacacctgccagccgatgacacctgcttgatgactggcgatcagctcatccaaccgcgcacagagtgcatttacccgctcatcaatcagcgcctcatcatcaccagcaaattccacaatgttcagcccgagcatctcttggtcaggcacatcggtaatcaactcgctgacggaatgccagacaatatcttcccgcgccagattcagcactttactgtccaccgtctctacgctaagcgcccgcgcctcaaccataaacggcgcgttacgcagcgcagagtcaaaagagtcatatttgacgttcaccagacggcgcactttaggcaagcgtgtaatatccagccgcgcttcggtaataaaggccagcgtcccttcactacccgtcagaatgcgcgtcaggtcgaactcggtcatctcatcgttaaagacatgacgcagatcgtaaccggtaagaaagcggttaagtttggggaagttgtcgataattaactggcgttgctgacggcaacgttgataaaccgtgttataaattcgcccgattgtggtattggatttacccagcgtttccgccaattcgacgggtaaaggttgcgtatcgagaatatcgccccccaacaacaccgcgcgtacgccaagtacgtgatcactcgttttgccatagaccaggcttccctgaccggatgcatcggtattgatcatcccaccgagcgttgcccggttgctggtgctaagttccggcgcaaaaaagtagccgaacggtttcaggtactgattgagttgatcttttatcaccccggcctcaacgcgcacccagccctcttcagggttaatttcgatgatgcggttcatatggcgggacatatcaacaataatcccctggttgagcgcctgaccgttagtgccggtgccgccgccgcggggggtaaagatcaggctactatagcgttcctgcgcggcaagacgggcgatcagcgccacatctgcggtactacgcggaaataccaccgcatcggggagaagttggtaaatactgttgtcggtgctcattgtcagacgatcggcataacttgtcgccgtatcgccggtaaaaccttgttgctccagctcttgcaaaaaattaagcaccagttgaacgacgccgggtgcctgggaaatctgtggaatcattatattgaccctttcctgcggtctgtgatgtaggtcgatacactattctttcaggctgctgcaatagcgcactgaaaggtgatgtttgtttactctatggatttcgtgttgcaggaaggcggcaagcgagtgaactccaggagcttacaatagtaagtgactggggtgaacgaacgtagccgcagcacatgcaacttgaaatacgacgagtaaatcgtttgcgtgttgcctgagttgttgtaccacatttttttctaacacgcccatcagaattaagggcagaatcggcctgttaaaaaccgctgaaattgctcatcattatgcaggtgagtttcgcgtgttcacgtcgcgtcgacgatttgacgcacaaaaaaggtgaaaagtagttatggtaaatgttcgtcagcccagggatgtcgcacaaattctgcttagcgtgctgtttttagccatcatgattgtggcatgtctgtggattgttcaaccctttattctcggctttgcatgggccggtacggtggttatcgccacctggccggtattgttacgtttgcaaaagatcatgtttggccgccgctctctcgccgttctggtgatgacgctgttattagtgatggtgtttatcatccctattgctttgctggttaacagtatcgtcgacggcagcggcccgctaattaaagccatttccagcggtgacatgacgttacccgatctggcgtggcttaataccattccggtgattggcgcgaagctgtatgcaggctggcacaacttgctggatatgggggggacggcgatcatggcgaaagtccgcccttatattggcaccaccaccacctggttcgttgggcaggcggcgcatatcgggcgctttatggtgcattgtgcgctgatgcttctcttcagtgccctgctgtactggcgcggtgaacaggtggcacaaggcattcgccattttgcaacccgtctggcaggcgttcgcggagatgccgccgtgctgctggcggcacaggctatccgcgcggtggcgctgggtgtggtggtgacggcgttagtacaggcagtgcttggcggtatcggcctcgccgtatccggcgtaccttatgcaacgttgctaacggtgttaatgatcctctcctgccttgtccagcttggcccgttgccggtactgattccggcgattatctggctctactggactggcgataccacctggggaacggtattgttagtgtggagcggtgtggttggcacgctggataacgtcatccgcccaatgttaattcgcatgggtgccgatttaccgctgatcctgattctctctggcgttattggtggtttgattgctttcgggatgatcggtctgtttattggtccggttctgttagccgtttcctggcgtctgtttgccgcgtgggtggaagaagtcccgccgccgacggaccaaccggaagaaattctcgaagaacttggcgaaatcgagaaaccgaataagtaatttctcatcaggcggctctgccgcctgattgttaaccaccgctaattgatatttgcttgctcttccccatattttcctgcttaccgccattcagctggtagtacctgtcgcaaattctttacagtttttaaactaatgagacgaatctgatcgacgcaaaaagtccgtatgcctactattagctcacggttataaatcaacatattgatttataagcatggaaatcccctgagtgaaacaacgaattgctgtgtgtagtctttgcccatctcccacgatgggcttttttttaacatttttccgcttcgctacctcgcccctcactctttccaataatgttgcacaagatactgtgactctcttcaagccgtcagcaggctgataatgttatttatattttattgtttatttcatgcagccattacacgatgaacgcttatgaactccaggcactccgccatatttttgccatgactattgatgaatgcgcgacctggattgcccagaccggtgacagtgaaagctggcgtcagtgggaaaatggcaagtgtgccattcctgatcgtgtagtcgagcaactgttggctatgcgtcagcaaagaaaaaaacatcttcatgccatcatagagaaaataaataaccgcatcggcaacaacaccatgcgttttttccccgacttaaccgcatttcaacgagtctaccctgatggcaattttattgactggaagatctatcaaagcgtagctgctgaattatatgcacacgatctggagcggctttgttaatttttccacagaaaggaattgtcgttgttacaacaataatgaacggatgctgacacaacatcgcttcactttttaaagcacctttgctaagtagaacctatgaaaaatccctatttccctaccgcacttgggttgtattttaattacctggtgcatggtatgggcgtccttttgatgagcctgaatatggccagcctggagacactttggcagactaatgccgcgggtgtcagcatagttatcagtagcctgggcattggtcgattaagtgtcttgctttttgcaggattattatccgatcgctttggtcgccgcccttttatcatgctcgggatgtgctgctatatggccttcttttttggcatcctgcagaccaataacatcattatcgcttatgtttttggctttctggcgggaatggcaaacagttttctcgatgcaggcacttatcccagtttgatggaagcttttccacgcagtcctgggacagccaatattttaattaaagcatttgtttccagcggacaatttttattaccgctaatcattagcctgttagtgtgggctgaactgtggttcggttggtcctttatgattgctgcaggcattatgtttattaacgctctgtttttataccgttgtacgttcccaccccatccgggtcgtcgcttacctgtcataaagaaaaccaccagctctacggaacatcgctgtagtattatcgatttagccagttataccttatatggctatatcagtatggcaacgttttatctggttagccagtggctggcacagtacggacaatttgttgcaggcatgagttacactatgagcatcaaactactcagtatctacaccgtgggtagcctgctttgtgtatttattaccgctccactcattcgtaataccgttcgcccaacaacattactgatgctgtacacctttatcagttttattgctctgtttaccgtctgcctgcatcccacattttatgtggtgataatatttgcttttgtcattggttttacctctgctggaggtgttgtgcaaattggcctgacgttaatggctgaacgtttcccttacgctaaaggtaaagctacagggatctattacagtgcgggcagtattgcgacctttactattccgttgattacggctcatctgtcccaaagaagtattgccgatattatgtggttcgataccgccatcgctgccatcggttttttactggcactgtttatcggcttacgcagccgcaaaaaaacgcggcatcacagcctaaaggaaaatgtcgctccgggtgggtaatgcaatattcttttcaggtcatgcaagatcttacggataaataactctttctgcgctaactaaggaaaatcgcgatcaaaaacaaactatgacatgcaatattcctggaaacataaactttatgccatgtacccagggaaaatcatcttcagtatagtaattatgtaaaccgtcggagaacaatacgtacggtaacgaaattatctttcagcaaggagctgtgaaaatgtctcaaaataaggctttcagcacgccatttatcctggctgttctttgtatttacttcagctacttcctgcacggcattagtgttattacgcttgcccaaaatatgagttctctggcggaaaagttttccactgacaacgcgggcattgcctacttaatttccggtatcggtttggggcgattgatcagtattttattcttcggtgtgatctccgataagtttggtcgtcgggcggtgatattaatggcagtaataatgtatctgctattcttctttggtattcccgcttgcccgaatttaactctcgcctacggtctggcagtgtgcgtaggtatcgctaacagtgcgctggatacgggtggctaccccgcgctcatggaatgctttccgaaagcctctggtagcgcggtcatactggttaaagcgatggtgagttttgggcaaatgttctacccaatgctggtgagctatatgttgctcaataatatctggtacggctatgggctgattattccgggtattctatttgtactgatcacgctgatgctgttgaaaagcaaattccccagccagttggtgggcgccagcgtaactaatgaattaccgcaaatgaacagcaaaccgttagtctggctggaaggtgttagtagcgtactgttcggtgtagccgcattcagcaccttttatgtgattgtggtgtggatgcccaaatatgcgatggcttttgctggtatgagtgaagctgaggcattaaaaaccatctcttattacagtatgggcagcttggtctgtgtctttatttttgccgcactactgaaaaaaatggtccggcccatctgggctaatgtatttaactctgcactggcaacaataacagcagccattatctacctgtacccttctccactggtgtgcaatgccggagcctttgttatcggtttcagtgcagctggcggcattttacagctcggcgttagcgtcatgagtgagttttttcccaaaagcaaagccaaagtcaccagtatttatatgatgatgggtggactggctaactttgttattccactgattaccggttatctgagcaacatcggcctgcaatatatcattgttctcgattttactttcgcgctgctggccctgattaccgcaattattgtttttatccgctattaccgcgttttcattattcctgaaaatgatgtgcggtttggcgagcgtaaattttgcacccggttaaacacaattaagcatagaggttaaaggagttaattatggatgttaccgcaaaatacgaattgattgggttgatggcctatcctatccgccacagtttaagccccgaaatgcagaataaagccttagaaaaagcgggattgccatttacctatatggccttcgaagtggataacgatagctttcctggagcaattgaaggattaaaagccctcaaaatgcgcggaactggtgtaagcatgccgaacaaacaactggcgtgtgaatatgttgatgaattaacaccagctgccaaactggtgggggccatcaacaccatcgttaatgatgatggctatctgcgtggctataacaccgacggcacgggccatattcgcgccattaaagagagcggttttgatatcaaaggcaaaacgatggtgctgttaggggccggtggtgccagtacggcaattggcgcgcagggggcaattgaaggtttaaaagaaattaaactctttaaccgtcgggatgagttcttcgataaagccctcgccttcgcgcagcgggttaatgaaaacaccgattgtgtcgtcacggtcaccgatctcgccgatcagcaagcctttgctgaagccctggcttccgccgacattttaaccaatggcacaaaagtgggtatgaaaccccttgagaatgaaagtttggttaatgatatcagtctgttacatccgggacttctggtcactgaatgcgtgtataacccgcatatgacgaagttattgcagcaggcgcaacaagctggttgcaaaacgattgatggatacggcatgttgttgtggcaaggggctgaacagttcacattatggactggcaaagatttccctctggaatatgttaaacaggtcatggggttcggtgcctgacaggctgaccgcgtgcagaaagggtaaaaaatgaaaaccgtaactgtaaaagatctcgtcattggtacgggcgcacctaaaatcatcgtcagcctgatggcgaaagatatcgccagcgtgaaatccgaagctctcgcctatcgtgaagcggactttgatattctggaatggcgtgtggaccactatgccgacctctccaatgtggagtctgtcatggcggcagcaaaaattctccgtgagaccatgccagaaaaaccgctgctgtttaccttccgcagtgccaaagaaggcggcgagcaggcgatttccaccgaggcttatattgcactcaatcgtgcagccatcgacagcggcctggttgatatgatcgatctggagttatttaccggtgatgatcaggttaaagaaaccgtcgcctacgcccacgcgcatgatgtgaaagtagtcatgtccaaccatgacttccataaaacgccggaagccgaagaaatcattgcccgtctgcgcaaaatgcaatccttcgacgccgatattcctaagattgcgctgatgccgcaaagtaccagcgatgtgctgacgttgcttgccgcgaccctggagatgcaggagcagtatgccgatcgtccaattatcacgatgagcatggcaaaaactggcgtaatttctcgtctggctggtgaagtatttggcagcgcggcaacttttggtgcggtaaaaaaagcgtctgcgccagggcaaatcagcgtaaatgatttgcgcacggtattaactattttacaccaggcataagcaataatatttcggcgggaacaccctccccgccgaactaaaaaatatattcaatcgtatttaataaaaatatttcgtgagtctctgtgcgctaattctccatttggcgtagggaaaatcacatctgaatcaggaattaacaatgaaacctgtaaaaccacctcgtattaatggacgagtgccggtcctgagcgcacaggaagcggtgaattatattcccgacgaagcaacactttgtgtgttaggcgctggcggcggtattctggaagccaccacgttaattactgctcttgctgataaatataaacagactcaaacaccacgtaatttaagcattattagtccaacagggcttggcgatcgcgccgaccgtggtattagtcctctggcgcaagaaggtctggtgaaatgggcattatgtggtcactggggacaaagcccgcgtatttctgaactcgcagaacaaaataaaattattgcttataactacccacaaggtgtacttacacaaaccttacgcgccgccgcagcccaccagcctggtattattagtgatattggcatcgggacatttgtcgatccacgccagcaaggcggcaaactgaatgaagtcactaaagaagacctgattaaactggtcgagtttgataacaaagaatatctctattacaaagcgattgcgccagatattgccttcattcgcgctaccacctgcgacagtgaaggctacgccacttttgaagatgaggtgatgtatctcgacgcattggttattgcccaggcggtgcacaataacggcggtattgtgatgatgcaggtgcagaaaatggttaagaaagccacgctgcatcctaaatctgtccgtattccgggttatctggtggatattgtggtggtcgatccggatcaaacccaactgtatggcggtgcaccggttaaccgctttatttctggtgacttcacccttgatgacagtaccaaacttagcctgcccctaaaccaacgtaaattagttgcgcggcgcgcattattcgaaatgcgtaaaggcgcggtggggaatgtcggcgtcggtattgctgacggcattggcctggtcgcccgagaagaaggttgtgctgatgactttattctgacggtagaaacaggtccgattggcggaattactagtcaggggatcgcctttggcgcgaacgtgaatacccgtgccattctggatatgacgtcccagtttgatttttatcacggtggcggtctggatgtttgttatttgagttttgctgaagtcgaccagcacggtaacgtcggcgtgcataaattcaatggtaaaatcatgggcaccggtggatttattgatatcagtgccactagcaagaaaatcattttctgcggcacattaactgcgggcagtttaaaaacagaaattaccgacggcaaattaaatatcgtccaggaaggacgggtgaagaaatttattcgggaactaccggaaattactttcagcggaaaaatcgctctcgagcgagggctggatgttcgttatatcactgagcgcgcagtattcacgctgaaagaagacggcctgcatttaatcgaaatcgcccctggcgtcgatttacaaaaagatattctcgacaaaatggatttcaccccagtgattagcccagaactcaaactgatggacgaaagattatttatcgatgcggcgatgggctttgtcctgcctgaagcggctcattaacaggagtataatgatggatttttctttaactgaagaacaagaactgctgctggccagtattcgcgaactgattacgactaactttccggaagagtatttccgcacctgcgatcaaaacgggacatatccgcgtgagtttatgcgggcgctggcggataacggtatttccatgcttggcgtgccggaagaatttggtggtatccctgcggattacgtcacccaaatgctggcgctgatggaagtgagtaaatgcggtgctccggcatttttaattaccaacggtcaatgtattcacagtatgcgccgtttcggttctgcagagcagctacgtaaaacggcagagagcaccctggaaacgggtgatcccgcctatgccctggcgttgacggaaccaggtgctggcagtgataacaacagtgccactaccacttacacgcgtaaaaacggcaaggtctacatcaacggacaaaaaacctttattaccggtgcgaaagagtacccgtatatgctggtgctggcgcgcgatccgcaaccgaaagatcccaaaaaagccttcaccctgtggtgggtcgactccagtaagcccggcattaagattaacccgctgcataaaatcggctggcatatgctcagcacctgcgaagtctatctcgacaacgtggaggttgaagagagcgacatggtgggcgaagaaggaatgggtttcctcaatgtgatgtacaactttgagatggagcgcctgatcaacgccgcgcgcagcaccggctttgccgaatgcgcctttgaagatgccgcccgctatgccaaccaacgtatcgcttttggtaagcccattggtcataaccagatgatccaggaaaaactggcgctgatggcgattaagatcgacaacatgcgcaacatggtgctgaaagtggcatggcaagccgatcagcatcagagtctgcgcaccagcgcggcgctggcaaaactgtactgtgcacgtaccgcaatggaagtcattgatgatgcgattcaaatcatgggcggtctgggctataccgatgaggcgcgcgtctcccgcttctggcgtgatgtccgttgtgaacgtatcggcggcggtacagacgaaattatgatttacgtagcaggtcggcagatcctgaaagactatcagaacaaataatctgcaggcggcgcagcttcttaacaaactgcgccgccagatttatccaacaagacttaccggttgaggaaattcagataggatttcttgttccgcaaaacagtttttaaattgtctacggtaatcgctggggctacaaccgacatggcgcaaaaacagtttggcaaagtgatcgacattttcataacccacacgccaggagatctctgcctgacttaattcagtattagtgagactccattttgcttccgtcatacgccgttgaataacatagttaataggggaaatacgatactctttggtaaattcatggcaaatataactgacgctggcacgaaattttttgcttaactgttctaaagtgattttttcgcgataattattattcagatagaaaagaatatcttttatcagaacatcttttttaatatacccctgctcgctacgataagcatttttaaaattttcgtagtaaagaatggctaacgtataggcaaatgcatcccataagctagatgtttggctatttttactttgcggcaaaatcacacttagctcattaaataaggtttttatgacttcttttccctgccccgcggcaattaccggacaagaatgcggttgcagtagctgattttcctcagccccctgaaactgaaagccgtacagcgcacaggtacacgtcgttgccggatcgttaacgtcagaggccaccgcatgcagcctgccgcgttctatcaccacaatgtcatccgcatgtgcgacatataagctagaatcgatggtaaaccttgcaacccctttcttgacgtaaatcaactcggtttcattgtcatgaacgtgatgtccggactcccattttggatcatcgctaaatgcaaaacgactaagccgtggcgttttaccggcgacaaacagcgtttcactggcgttatcaaaacagcgttgatacatgacaacctccctattccatgagcaagcaaaaacaatatatgccggataaaatacggcgtgtattgcggttatacaaccgcgtttagcgagagctaaacaagattatttacactgaatgcaagattgtacggtcatggaataactatattgccgcaaattgcacttttgttttagcgatcgcattttttttgcaagattgttggcaaggaaaacagcttgctccgtcgaaaaccccgcaccgctatcgcacactattttcaggccatttttaccttccatcggagatggttccgtatgcgactcacaggagaaatcatgaaaataataacctgctttaagctggtgcctgaagaacaggacattgttgtcactccagaatacaccctgaatttcgacaatgccgacgccaaaatcagccagttcgatctcaatgccattgaagctgcaagccagctcgcaacagatgacgatgagatagccgcgctgaccgttggcggcagtttgttgcagaacagcaaagtgcgcaaagacgtgctatcccgcgggccgcacagcctgtatttggtgcaggatgcgcaacttgaacatgcactgcctctcgataccgcaaaagcgctggcggcagcaattgaaaagatcggcttcgatttactgatctttggtgaaggttccggcgacctttatgcccagcaggttggcttgctggtcggagaaattctgcaacttccggtgattaatgcagtgagtgctattcagcgtcagggcaatacactggtgattgaacgcacgcttgaagatgatgttgaagttattgaactctctgttccagccgtgctctgcgtcacctccgatattaacgtgccacgcattcctagcatgaaagccattctcggcgcgggtaaaaaaccggtaaatcagtggcaggcaagtgatattgactggagccagagcgcgccacttgctgaactggtcggcattcgcgtaccgccgcaaacagaacgtaagcacatcattatcgataacgatagcccggaggccattgccgagctggcggaacatctgaagaaagccctgaactgaagcctacggagaagaaacgatgagtcaattaaacagcgtctgggtctttagcgataatcctgaacgttatgctgaactgtttggcggcgctcagcaatggggccaacaggtgtatgccattgtacaaaataccgaccaggcgcaggcagttatgccttatggtccaaaatgtctttatgttcttgcgcaaaacgacgcgctgcaacgcactgaaaattacgccgaaagcattgctgccctgctgaaagataaacaccccgctatgttgctgttggccgcgacgaaacgtggtaaagcgctggcagcacggttaagtgtgcaactgaatgcggcgctggtgaacgatgccacggcggtggatattgtcgatggtcacatttgcgccgaacaccggatgtatggcgggttagcgttcgctcaggaaaagatcaacagcccgctggcgatcattacccttgcacccggtgttcaggaaccgtgcaccagtgatacctctcatcagtgcccgacagaaacggtaccttatgttgctccgcgtcatgaaattctctgtcgcgaacgccgtgcgaaagccgcaagcagcgtggacctgagcaaagcaaaacgtgtggttggcgtcggtcgtggactggcggcgcaggatgacctaaaaatggtccacgaactggcggcggtgctgaatgctgaagtcggctgtagtcgtccaattgccgaaggcgagaactggatggagcgtgaacgttatatcggtgtctccggcgtgttgctgaaatccgatctctacctgacgctggggatctccgggcagatccagcatatggttggcggcaacggcgcaaaagtgattgtcgccatcaataaagataaaaatgcgccaatcttcaactatgccgactacggtctggtgggcgatatctacaaagtcgtccctgccctgattagccagttgagccgctaattcccctttcaaccacatctcccgctgtaaacgcagcgggaagggagcataacgcatgagcgatgacaaatttgatgccattgtggtcggtgcgggcgttgctggtagcgttgccgcactggtcatggcacgagccgggctggatgtcctggtgatagaacgcggcgacagtgccggatgtaaaaacatgaccggcgggcgtctttatgcccacacacttgaagcaatcattccaggctttgcagtaagtgcgccggtagaacgcaaggtcacacgcgagaaaatctccttcttaaccgaagaaagcgccgttaccctcgattttcaccgcgagcagccagatgttccgcaacacgcatcttataccgtattgcgtaatcgtctggacccgtggttgatggaacaagccgagcaggcgggcgcgcagtttatcccaggcgttcgcgtcgacgcgctggttcgtgaaggaaacaaggtcactggcgtgcaggctggggatgatattctcgaagcgaatgtggtgattctggctgatggcgttaacagcatgcttggccgcagcctgggaatggttcccgcttccgatccgcatcattacgctgttggtgttaaagaggttattggcctcacaccagaacagatcaacgatcgctttaatattacgggcgaggaaggtgccgcctggctgtttgccggttccccttctgacggcctgatgggcgggggatttctctataccaacaaggattccatatccttggggctggtttgtggattgggtgatatcgcccatgcgcaaaaaagcgtgccgcaaatgctggaagattttaaacaacaccccgccattcgcccgctgattagcggcggcaaactgcttgaatattccgcgcatatggtgccggaaggcggtctggcaatggtgccgcaactggttaacgagggcgtgatgatcgttggtgacgccgcaggcttctgcctgaatttgggttttacggtccgcggcatggatttagccatcgcaagcgctcaggctgccgccacaacggtgatcgccgccaaagaacgcgcggatttctccgccagcagtctggcgcaatacaaacgtgagctggaacaaagctgcgtcatgcgtgatatgcagcattttcgcaagatcccggcgctgatggaaaacccgcgcctgtttagccaatacccacgaatggtagccgacatcatgaacgagatgttcaccatcgacggcaaaccaaaccagccggtacgaaaaatgatcatgggacatgcgaagaaaattgggctgatcaacttgctgaaagatggcattaagggagcaaccgcgctatgagccagaacgctacggttaacgtcgacatcaaattaggcgtcaataaattccatgttgatgagggccacccgcatatcattctggcggaaaatcccgatatcaatgaattccataaattaatgaaagcctgccctgccggactttataagcaggatgacgcaggaaacattcattttgattccgccggttgtctggagtgcggcacctgtcgggtgctgtgcggtaacactattctcgaacagtggcaatatcccgcaggcaccttcggtattgattttcgctacggctaatcatgcatcccacaggcccgcatctcgggcctgatgttctgtttcgagagtccaacatgaaagtgacattaacgtttaacgaacaacgtcgtgcggcgtatcgtcagcaagggttatggggcgatgctagcctggccgattactggcagcagaccgctcgtgcgatgccagacaaaattgccgtggtcgataatcatggtgcaagctacacctatagcgcgctcgatcacgccgcgagctgtctggcaaactggatgttagcgaagggtattgaaagtggcgatcgcatcgcatttcaactgcctggctggtgtgaatttaccgttatctatcttgcctgcctgaaaatcggtgcagtttccgtgccgctgttgccttcctggcgggaagcagaactggtgtgggtgctcaataagtgtcaggcaaaaatgttctttgcaccgacgttgtttaaacaaacgcgtccggtagatttaatcctgccgctgcaaaatcagcttccacaactacaacaaattgtcggcgtggacaaactggctcccgccacctcttccctcagtttaagtcagattatcgccgacaataccagtctgaccacggcgataacgacccacggcgatgaattagctgcggtgctgtttacctccggaaccgagggtctgccaaagggcgtgatgctaacgcataacaatattctcgccagtgagcgggcttattgcgcgcgactgaatctgacctggcaggatgtctttatgatgcctgcgccacttggtcacgcaacgggctttctgcatggcgtaacggcaccattcttaattggcgctcgcagcgtgttgttagatattttcactcctgatgcgtgtctcgcgctgcttgagcagcagcgttgcacctgtatgctcggcgcaacgccgtttgtctatgatcttttgaatgtactagagaaacaacccgcggaccttagtgcgctgcgtttctttctttgcggcggaaccacaatccccaaaaaagtggcgcgtgaatgccagcagcgcggcattaaattattaagtgtttatggttccacagaaagtagcccgcatgcggtggtgaatctcgatgatcctttgagccgctttatgcacaccgatggttacgctgccgcaggtgtagagattaaagtggtcgatgacgcacgcaagaccttaccgccaggttgcgaaggtgaagaagccagccgtggcccaatgtgtttatggggtattttgatgaacctgaattaaccgcccgtgccctggatgaagaaggctggtattacagcggcgatctctgccgtatggatgaggctggctatataaaaattaccggacgcaaaaaagatattattgtccgcggcggcgaaaatattagcagccgtgaagtggaagatattttattgcagcatcctaaaattcacgatgcctgtgtggttgcaatgtccgatgaacgtttaggtgaacgaagttgcgcttatgtcgtgctgaaagcgccgcatcatagtttaagcctggaagaggtagtggctttttttagccgtaaacgggtcgcaaaatataaatatcctgaacatatcgtggtaatcgaaaaactaccgcgaactaccagtggtaaaatacaaaagtttttgttaagaaaagatattatgcggcgtttaacgcaggatgtctgtgaagagattgaataagtttcatcttcggggatcacataaccccggcgactaaacgccgccggggatttattttatttcttcagttcagccaggcttaaccaggtttgcaccacggtgtccgggttcagagacaggctatcgatcccctcttccatcaaccatgcggcaaagtcttcgtggtcggacggaccctgaccgcaaatcccgacatatttgccctgtttcttcgcggcacggatagccatgctcagcagtgctttcaccgcatcgttgcgctcatcgaacaattcagacaccacgccggagtcacggtccagaccgagcgccagctgcgtcatatcgttactgccaatactgaagccgtcgaaatattcgaggaactgctcggccagcaaggcgttggacgggatttcacacatcatgatgattttcagcccgttctcgccacgtttcagcccctgacgcgccagttcttcaaccaccgctttcgcctgatctacggtacgcacgaacgggatcatgatctcaacgttggtcagtcccatgtcgttgcgcacacgtttcactgcttcacactccagcgcgaaacagtcgcggaagctgtcggaaacatagcggcccgcgccacggaagccgagcatcgggttctcttcatctggctcgtaacgctcaccaccgaccaggttggcatattcgttgcttttaaaatcagagagacggacaatgacgcgcttcggataaaacgcggcacccagcgtcgcgatcccttcagtcagacgaccaacgtaaaattcacgcggagaatcaaaacctttcatcatctcgcggatttcgttttgcaactgcggttcctgatcgtcaaactcaagcagtgcgcgtgggtggacgccaatcatacggttgatgataaattccagacgcgcaaggcccacgccttcgttcggtaggcaggcgaagtcgaaagcacggtccgggttaccgacgttcatcatcactttcaacggcagatccggcatcgtttctacgctggagcttttcacgctaaattccagcaactccgcatagacgtaaccggtatcaccttcggcacaagaaacagtgacgttctcaccgtctttcatccgttctgttgcatctccacagcccactaccgccggaatgcccagttcacgagcgatgatcgccgcgtgacaggtacgaccgccacggttggtgacgatggcagatgctttcttcatgatcggttcccagtccgggtcggtcatgtcagtaaccagcacgtcgccaggttcgatgcggttcatttcgctgatgtcatggatgactttcaccggacccgcaccgatgcgatgaccgatagcacggccttcggcgataatcttaccctgactatgcagcgtataacgctccatgacctgaccgcgactgcgcacggtttccggacgcgcctgcacaatgaacagtttaccggtgtggccatctttcgcccactcaatatccatcgggcgaccgtagtgtttctcaatttgtacggcctgttttgccagttcctgcacttcttcgttggtcaggctgaagatgtcacgctgttcctgcggtacgtcttcgattttaacctgcttgccgtgctcctgggtcggcgcgtaaaccatgcggatttttttgctccccatggtgcggcgcacgatagccgggcgattcgccgccagtgtcggtttatgcacgtaaaactcatccgggttaaccgcaccctgcacgaccatctcaccaaggccccatgcggaagtgataaacaccacctggtcaaagccggattcggtatcaatggagaacatcacgccagaacttgcgaggtcagagcgcaccatccgttgaacaccggcggagagcgccacaccacggtgatcgtaaccctggtgcacacgataagagatggcgcgatcgttaaacagagaagcaaatacatgtttcactgccacgagaacggcgtcaaaaccctgaacgttgaggaaggtttcctgctgaccggcaaaagaagcgtccggcatatcttctgcggtggcggaggagcgcaccgcaaaagaggcgttttcgtcatcggcggaaagctgtgcataggcttcgcggatggcgttttccagctcaggctggaagggagtgtcgataatccactggcggatttgcgcgcccgctttcgcaagctgagtaacatcgtcaatatccgttttatccagcagttcataaatgcgctggtttacgccgctttggtccagaaactggttaaacgcgtcggcggttgtggcgaaaccattcggaacggaaacacccattccggaaagattagtaatcatttcacccagggaggcatttttgcccccaaccctgtctacatcattcatgccgagttggttataccaaagcaccagcggactgctgccattgttggacatcgaacaatccttttgtgataaatgaacggtttgagaaacacatttctgcgcatttatctttgcatatttaaccggatgaaaaaaacggtgaatcgttcaagcaaatatatttttttactttttaagactgatcccagcgttgcgcaaatctgctctcttcgacaatttccacataaaccatcggtataaacgaaaccataaaaatgaaatgctgttttcataaaaaataaaattgaaggttcattttataaaccagacataacgttctacgcttctgtgcgtttttaatttatgctttcatagaattatgtctgcatcacgggaagaacaaaatggataatgctgttgatcgccacgttttttatatttctgatggtacggcaataactgcggaggtattaggacacgcagtaatgagtcaatttcccgtcactatcagcagcatcacgctgccgtttgtcgaaaatgagagccgtgcacgggcagtgaaggatcagattgacgcaatttatcaccagacaggcgtgcgcccgctggtcttctactccatcgtgttgccggagattcgcgccatcatcttgcaaagtgaaggcttttgccaggatatcgttcaggcgctggttgccccgctacaacaagagatgaaactggatccaacgccgattgctcatcgtacccatggccttaaccctaataatctcaataaatatgatgcgcgcattgcggcgattgattacaccctcgcccacgatgacggcattagcttgcgcaatctggaccaggctcaggtgatcctgctcggtgtttctcgctgtggtaaaacccccaccagtctgtatctggcaatgcagtttggtatccgcgcggcaaactacccctttattgccgacgatatggataatctggtgctacccgcgagcctcaaaccgcttcagcataaattgttcggcctgactatcgacccggaacgtctggcggcgattcgcgaggaacgtcgggagaacagtcgctatgccagccttcgtcagtgcaggatggaagtcgcggaagtggaagccttgtaccgtaaaaatcagatcccgtggattaacagtaccaattatagcgtagaagagattgccaccaagatcctcgatatcatgggccttagtcgccgaatgtactaaagaactagtgcattagcttatttttttgttatcatgctaaccacccggcgaggtgtgacacacctcgcacttgaaatcagcagcgattggtttatcgtgatgcgcatcacttcccggcagtcctgccgtagaagcaacaaatttctgagacttgtaatgaacagaactgacgaactccgtactgcgcgtattgagagcctggtaacgcccgccgaactcgcgctacggtatcccgtaacgcctggcgtcgccacccatgtcaccgactcccgccgcagaattgaaaaaatactgaatggtgaagataagcgactgttggtcattattggcccctgcagcatccacgatctcaccgctgcaatggagtacgccacccgtctgcagagcctgcgcaaccagtaccagagtcggctggaaatcgtaatgcgcacctattttgaaaaaccacgaactgttgtcggctggaaaggactaatctccgatccagatttaaacggcagctatcgggtaaatcacggtctggagctggcgcgcaaattacttttacaggtaaatgagctgggcgtcccaaccgcgaccgagttcctcgatatggtgaccggtcagtttattgctgatttaatcagttggggcgcgattggcgcacgtactaccgaaagtcagatccaccgcgaaatggctagcgcactctcctgtccggtaggtttttaaaatggtaccgatggcaatacgcggattgctgtggatgctatccgcgcagcccgcgccagccatatgttcctcagcccagacaaaaatggtcagatgaccatctatcagaccagcggcaacccgtatggccacattattatgcgtggcggcaaaaaaccgaattatcatgccgatgatatcgccgcagcctgcgatacgctgcacgagtttgatttacctgaacatctggtggtggatttcagccacggtaactgccagaagcagcaccgtcgccagttagaagtttgtgaggatatttgtcagcaaatccgcaatggctctacggcgattgctggaattatggcggaaagtttcctgcgcgaaggaacgcaaaaaatcgtcggcagtcagccgctcacttacggtcaatccattaccgacccgtgtctgggctgggaggataccgaacgcctggtcgaaaaactcgcctctgcggtagatacccgcttctgaatgcgtgcccattcctgacggaatgggcatttctgcgcaacttgttgtcttctcaacaaattactgcttgctctggtcagccataatattgataataagaatcattgttatatcaattattattaatttttatgcgttatacggatagcagaaaactcacgcctgaaacggatgccaatcacaagaccgcttccccgcagcctattcggcgaatttccagccagacactgttaggtccggatggcaaactgattatcgatcatgacgggcaagaatatctgctccgtaaaactcaggctggcaagctgctgttgaccaagtaacctttaactgctgcagctgacttccagccgtttaccccagtcaggtggacgactgacatagtcatcatctctgtcgctgaaaggatttcgcaacgcctcatgcaggcggtgcaattccgtcatatcacccttttctgccgcttcaatcgcccgttgcgccaaccagttgcgcaataccagagcggggttaacgctttgcatcagttgctgacgctcactatcgctaacctcgtcttgttgcaaacgcccccgataacgggcaaaccagtcatcaaatgccgcacgatcaataaactcatcacgtagcggactcgccgcgctgtgctgctcggtcagactcagcatgcggaatgtgcgggtataatcgctgcgctctcgcgccatcagactgaataattcattcagtagcgcgttatcctctttttgctccgtcatgaagcccagtttctgccgcatccgttctccataatgcgtcaacaaaacctgctgatagctgtccagggcctcattcagggcatctacggcaacaaatgggctcaatgtctgcgccagacgctgtaaattccacaacgcgacggcaggttgattatcaaagctgtaacgcccttgatgatcgctgtgattacaaataaaaccgggttcgtaatcatcaagaaaaccaaacggcccgtaatcaagcgtcagccccagcaggctcatgttgtcggtattcatcaccccatgagcaaagccgaccgtctgccattgggcaattaagctcgcggtacgtgcgacaacatcgctaaaccagagacggtatttgtcctcatcatctgcaagatgactccagtaatgacgaatagcaaagtcagctaactgacgaaccttttcgctctcgcggcggtagtaaaaatgttcgaaatgaccaaagcgcagatgacttggtgccacacgcatcagcatcgcgcctggctccgccgtttcccgatacactgggctatcgctggtgacgatacttaacgcgcgggtcgtcggaatgcccagataatgcatcgcctcactggcgagactttctcgtatcgtgctacgtaaaaccgcccgtccatcacccattcggctataaggcgtcaggccagcacctttcagatgccagtccattgtagtgccatcagcaagcagttgttcgccgagtaaaatgccgcgcccatcacccagttggcccgcccagacgccgaactgatgaccactgtaaacctgcgccagtggactcataccaggcagtagggcttcgccgccccagacacctgcgccatttttaaacaggctgcttggaatactcagcgtgttagccagttcggtattatgccaaatcagccgggcattatttaaaggcgtaggggaaagtgctgtataggtttctggcaattcatcgcgccagcgggtaacaaaagacagggtcatagatcctcctgtttgatagtgtagacggttactctcgtcttaaacaccagcaaacagaagggttatcgctgaaccaacgtcgttatctgatttatgggaacggcaggccacaggcatccctggagagcatggaaatcgaagggggtaatctgtgccaatatttctgccgtatcaatgcctcccgcaatgatgcaattgcaacaaggggaaatttgcgcctggatcgcacgaataaacggttcgaaggagcggtgcgtgatttgttgctgaataaaacttttatccagcatgacgcgggtgaaaagaccatcaaaaaccgctttcattgtgctattgcctgctcccaaattacctaacacaaggggatacacttggcttaaggataaaagaccgcgattatcttttccttcattgagatgcgggtaattctcattaatcaacagttcaataaacggatattttaatagttcgcctgcgtaattatccctctctaataataatgtagccacttgtggcgttaaattaagccaggcaaagagtttatgttgaataaaaaaatgttggcaactttttagtaattccaactgctcactaaataattgccaatgttgctcctcggtaagttgcgctataacccgactcgtcgggatacgaaccgtaccatcttcactggagaaatgggtaattaactcaacgccgacaaggacttgctggttgtctcttatcggcaggaaatagcaatcagaatgataaagattctccaaaaaaatcttcatggtaaccgtccctctcgaaggatgtttttcagtatccggctaaaagggatgaggccataagacataacaattacagaaggagtaactttcatttgttccatgttaaccactttttcaggggtcctttttttagattatcctgattataaacgaataatccatttacggaatttttgtctgcaaaatactactgtattcaggagtaaatggacggcgatgtatcatcgccgtccatttttcgacatattagattcgtctcgcctgccagaaatttttctgccaatagacattatcaagactggaacgcatcactcccttgctggtagaggcgtggataaattggttgttggtatcgtaaatacctacatgcaaaccattttgtccggaccccgttttgaaaaagaccaggtcacctggcagcaactcgtctttatcaatttgcgtgccaatagaggcttgttgtttggtttcacggggcagctgcaaatcgaaacgatcgcgcatcgtcacaaccacaaatccgctacagtccacaccgcgccgcgtcatgccaccataacgatacggcgtgccatgccagctttgtagctggtcgttcaaaccggcaataacggtaatgctatcagaaagtctggcatttggcggcggtgctttatggtggctacacccggccagaagcagtgctgtgatcaaaataaggcagaaacgcattccgtacggttcctctgttttttattcttgcattaatttagcgtcgtaattacccgattttcaagatactaatgaaatcagatggtgctaatcagcattctgtgaccttcgatatccagacggcgaaaattcatcccataggcctgcgccagatttggcggcgtgagcacctcttccctgcgtccactggccagcatttttccaccttttagcaaccacgcccgatgcgcatgacgcaatgtgtggttgagatcgtgactgctcatcacaatcgccagtccttgctgacacagcgcgctcagaattttgtctaacgcactttgttgcgcaacatcaagactgttcatcggctcatcaagaagcagcaattggcctgcgggattggcttgtggtgtgatttgcaacaccaccgcagcaagacgtacgcgttgccattcaccgccggaaagttgattggtgctacgtccgagtttgtcatcaagagccagcgcccctgcgacatcattcagtagttcggtacgcgttttatcgtgctgatgcagtgtcaggtagtgccagaccggcgttgcaaacggcggcgtctgctgttgactaagataggcgcgatgcagcgcgagttttgttgcggaccatgcttccagtggttgccccgcgaactgaatgcttcccttaccgctggtcattccggccattcgcgccagtaaggtactcttacccgcgccattcggccccaccaggtgcaggatctccccagcccgaacctcgccagaaagcggccccaggcgggtagattccgcaacatcttgtaactgcatcacaatagacattattttgccaacgccagtttaatgctttccatcacaatgggatcttccggcgtcatatccggggaaaaacgctggatgacttttccgtccctgccaaccaggaatttttcaaaattccataaaatatcatccgggtacagcggtgcacggcctttgctgaccatacgggcatagaatccgctctcttccggcgcgactgcggtcggcgctgcggcaatcaatttttgatacagcggatggcgtccttcgccattaacttcaatcttactgaacatcgggaacgtcaccccccatgtggtggtacagtaagttttaatctcttcatcgctgcccggttcttgttccagaaactggttgcacgggaatcccagcaccataaaacctcgatcgacccaggctttctgaatattctccaactgctcatattgcggcgttaagccacacttactggcgacattgacaatcaacagcacattaccggcgaacttctccagcgtggtcacttcaccgtcgatatctttcactacggtcgtcagaatggaatcttgcatcgtttctcctgggtgtggtcagtaaaaatcttagcttttaatcatagaccgtctttttgcggttaacgtcctgcttttaacaataaccagataaacaccggcgcacctaacgttgcggtgaccacgccaataggcagctctgcggcagctaatgccaggcgcgctacaatatcggccagcagcaatgcgctcgcccctgccagcgcgcagccgggaagtaatacgcgatgatcggttaaaccacacaaccggagaatatgggggatcaccagaccaataaagccgatagcacccgccagcgccacactgacgccaaccatccagccggtcgctgccaccagcacattgcgccagaaccacaggggtaaacccagttgccgcgcgctgatctcgccaagtgctaacatattcatcggcctggactgacaacagatccacaacaacacggggatcaatgccagcatcagccagctttgccgccagtctacgccgccaaaaccgcccatcatccagtacatcagctgacgcaaatcaacactggtggaaaagtagatagcccacgtcattagtgcgctacagataatccctaatgcaacgccagccagcaataaccgactggtgctaagatgacgacgggcgaaacgtaagagtattaaagtgatgataagcgcgccagcaatcgcacacagccctagcgcccagttggggagttgcccttgcccaagcaataccgcggcgataagccccacgcctgcgccgttagagacgccaagtagtccaggttctgccagaggattttcaaacaacgcctgcattacagcgccggatatagccagcgccgcaccaaccagcaatacagccagcgtacgtggcaggcgaatttgccagacgaacagttcgccacgaggagtaaaccagtcacctgggctgatccattgttcaccggcgcaaaggcttaagagaagcgccagcagcatcaaaacactcaggcataataaccagcgaatattttgtcgctgttgttggcgggcaagtgtcagcatggtatccgttctgctgaagtgtcatggcgttgattttacggtgactcttcgacagtgaaaagaaaaaaggccgcagagcggcctttttagttagatcagattactcgtctttggggctagcgttttcgacccggctttttaacttctgcccgggtctgaaggtcaccacgcgccgtgctgtaatgggaatatcctcgcccgttttcgggttacgtcccgggcgttgattcttatcacgcagatcgaagttaccaaaaccagagagtttcacctgttcgccgttttccagagcgcgacggatctcttcgaaaaacagttcaaccagttctttggcatcccgcttgctaagcccaagcttatcaaacagatattcactcatttcagcttttgtaagcgccataggttcaatccctcaaacttgcctggaatcgctcttttaatgcctctacacatttggcgacggtagcggcaatctcctcttcttcgagtgtacggctggtatcttgcaggatcaggcttatggcgaggctcttatacccctccgcaacacccttaccgcggtacacgtcaaataagtttacgccaactacctgatttacgccaactttcttacattcggataaaatatccgctgcgggaacgttttctgcgaccaccaccgcgatgtcacgacggttcgccgggaagcgagaaatctcgcgcgcctgaggcaccacgcggtctgcgagcttgttccactccagttcgaacaccagagtgcgaccgttaagatccagtttacgttccagttcaggatgaacaaccccaacaaaaccaatacgttcacctttcagataaatcgctgcggattgccccggatgcagtgccggattcgcttctgcacggaactcaacctcattcagtttaccggtcaggtcgagaacggattcaagatcgcctttcaaatcatagaaatcaacggtctcttttgccaggttccagtgctcttcgtaacggttaccgcaaatcacaccggctaacatcagatcctgacgaatgcccaacggtgcctgagtatctggtacgaaacgcagaccgctttcgaaaatgcgcacacggttctgctgacggttctggttgtacaccacggttgccagcaggccagtccacagagaaagacgcattgcactcatttcaacagagatcgggcttggcagcagtaaggcttcaacgcctggatggatcatctgctgcactttcggatcaacgaagctgtaggtgatcacttcctgatagcctttgtcgttgagcagcgttttcacgcgcttgaggctcaggtcagcttcacggtgagtacccataatcaggcttgcctgtaccggctcatccgggatgttgttgtagccgtaaacacgcgcgacttcttcaaccagatcttcttcaatctccatatcgaaacgccagctcggcgcaactgcctgccattcgtctttgccttcggtcacttcgcagccgagacgacgcagaatgtcagttacctgctcatccgcaatatgatggccgatcaggcgatccagtttgctacgacgtagagtgatggttgcacgcttcggcagcgttgcttcgttggtgatatcaattaccgggccagcctcaccaccgcagatgtcgatcagcagacgggtcgcacgttccatcgctttgtgctgcagtgccggatcaacgccacgctcataacggtgagacgcatcggtatgcaggccatgacgacgagcacgaccggtgatagacagcgggctaaagaacgcgcattccagcagcacgttttgtgtttcgtcattcacgccagagtgttcgccaccgaagatgccgcccatcgccagcgccttgttgtggtcggcgatgaccagagtgtcagcattcagcttcgcttcagtaccgtcgagcagcaccagcgtttcgccctctttcgccatccgcaccacaatgccgccttcaatgcgatctttatcgaaagcgtgcatcggctggcccagttcgagcagcacatagttggtgacgtcaacaactgcatcgatagaacggatcccgcaacgacgcagtttttctttcatccacagcggagttggcgctttaacgttaatgccttttaccacacggccaagataacgcgggcaggcttccggcgcttcgactgtaatcggcagcgtgtcgtcgatggtcgcaccaaccggaacgatttccggttgaaccagcggcagctggttcagcacggcaacgtcacgcgcaacaccaatgatgcctaagcagtcggcacggtttggcgtcacgctgatttcgatggtgttgtcatcaagtttcaggtattcacggatatcggtgccaatcggcgcatccgcaggcagttcgataatgccgctgtgatcgtcagaaatgcccagttcagagaaggagcacagcatcccttcagacggttcgccacgcagtttcgccgctttaattttgaaatcacccggcagaacagcaccaatggtcgctaccgctacacgcaggccctgacggcagtttggcgcaccgcagacgatgtccagcaggcgatcgccgccgacattcacttttgtcacacgcagtttgtcagcgttcggatgctgcgcacactcaaccacttcaccaacgaccacgccgtggaagctgccggcaaccggttctacaccgtcaacttccaggcccgccatagtgatttgatttgccagcgcatcgctatcaatcgccgggttcacccattcgcgtaaccacagttcactgaatttcataatctattcctgccttatttaaactgtttgaggaaacgcagatcgttttcgaagaaactacgcaggtcggtgacgccgtaacgcaacatagtcagacgctccatccccatcccgaaggcgaaaccagagtaaacttccgggtcgatgccaacgttacgcaacacgttcggatgcaccatcccgcagcccagcacttccagccatttaccgtttttacccatgacgtccacttctgcagaaggttcggtaaacgggaagtaggaaggacggaagcgaatctgcaaatcttcctcaaagaagttacgcaggaagtcgtgcagcgtgcctttcaggttggtaaagctgatgttggtatcaacaatcagaccttccatctgatggaacatcggcgtgtgagtctggtcgtagtcgttacgataaacacggccaggcgcgatgatacgaatcggtggctgctgggctttcatggtgcggatctgtacgccagaggtctgggtacgcagcaggcgggtagtgtcaaaccagaaagtgtcgtggtcagcgcgcgccgggtggtgaccaggaatgttcagagcatcgaagttatgataatcgtcttcgatttccggcccggttgccacggtaaagccaagctcaccgaagaaactttcgatacggtcgatggtacgggtaaccggatgcagaccgccgttttcaatgcgacgacctggcagagagacatcaatcgtttccgccgccagacgcgcattcagtgcagcgctttccagttccgctttacgcgcattcagcgcctgctgaacctgctctttcgcttcgttgataaccgcaccagctgccggacgctcttctggcggcagctcacgcagggtcgtcatctgaagggttaagtgcccttttttacccaaatattcgacgcgcacattatctaacgcggcaacatcactcgcctggctaatggccgccttcgcactggcaaccagttctgcgagatgactcatggttttcctcattgtgtcagtggtgacactggttcgttggacttagagcctatcccatcaggctattttacttgccattttggtcccgggctgtgctcgaaattctcacgtacttaaatacgctccggtttctccgcgctggccgtgtccagtctggctgcgacaattacacctgatgagacaggctttttatttttcaaaacgcgcatacaaaaaaagcctccactgggaggctttcaggcgctgttttccgtttctcttctcacgcgctagcctcctggattcaggtgctaaagtaaaaaaagaagcggaaaatagcagcattcattgcttgcgttaccttttggtactcttcaaaagacctttattgaaaaggctacggcgataaaagtcaatgttttgatggcgttgaaacgaaaagagggagactagctccctctttcaactggcttatgccagagctgctttcgctttttcaaccagagcggtgaacgctactttgtcgaatactgcgatatcagccaggatcttacggtcgatttcaacagaggcttttttcaggccattgatgaatttgctgtaagaaataccgttctgacgtgctgctgcgttgatacgcgcaatccacagttgacggaactgacgcttacgttgacgacggtcacggtaagcatactgaccagctttgataacagcctggaaggcaacgcggtatacgcgagaacgcgcaccgtagtagcctttagcttgtttcaaaattttcttgtgacgtgcacgtgcaataacaccacgttttacgcgagccatatgtgctctcctgtatctatattctaattaaaaagttaaaaacgttaacggcttatgcgtacggcaggcacgcgattaccaggcccagatcgcctttggaaaccatggctttcggacgcaggtgacgtttacgtttggtcgcttttttggtcagaatgtgacgcaggttagcgtgcttgtgcttaaaaccacctttaccggtttttttgaagcgcttagcagcaccgcgtacggtcttaatttttggcattttaataacttccacttcgcattgttaataaacgaaacaaaggcgaacaaagcctgtgaagcccgaaggctccacagacagtgctacttgaaggccttactgtttcttcttaggagcgagcaccatgatcatctggcggccttcgatcttcgttgggaaggattcgaccactgccagttcttgcaaatcgtctttcacgcgattaagcacttccataccgatttgctggtgcgccatctcacgaccgcggaaacgcagcgtgattttggctttatcaccctcttcgagaaagcgaatcaggctgcggagttttacctgatagtcgccttcatctgtaccaggacggaatttaatttccttaacctggataactttttgctttttcttctgttccttagaagacttgctcttttcatagaggaatttgccgtaatccattatacgacaaaccggcggctcggcgttagggctgatctcgactaagtctactccggcttcttctgctttctccagagcttctctcagactcacaataccaagctgctcgccttccagacctgttaagcgaacttcctgggcgcgaatttcgccattgatacggttagggcgcgccgtttgaactcgttttccgcctttaataccttattcctccaattgtttaagactgcggctgcgaatctcttgttgcagcttctcgatcacttcatttacgtccatgcttcccaggtctttaccacggcgggtgcgaacggtaactttgccactttccacctctttatcaccacagaccagcatatatgggacgcgacgcaaagtgtgctcgcggattttaaagccaatcttctcatttctcaagtctgctttaacacgaatgcccgcattacttagtttttgcgtcaattcgttaacgtattcagactgactatcggtaatattcatgataacaacctgaaccggcgcaagccaggtcgggaagaaaccagcgaactcttcggtcaggataccgatgaaacgttccatgctccccagaattgcgcggtgaatcattaccggtactttacgttcattgtcttcgcctacataagaagcgctcagacgagacggcaaagagaagtccagctgtactgtaccgcactgccatgcacgatcgaggcagtcatacagggtaaattcaattttcggaccgtagaaagcgccttcacccagttgatattcaaacgggatgttgttttcttccagcgcaaccgccaggtccgcctcagcacgatcccacatttcgtcgctgccaatacgtttttcaggacgagtggagagtttgacgacgatcttctcgaagccaaaagtgctgtacatatcatagactaaacggatacatccgttaacttcatcgcgaatttgttcttcagtacagaagatatgcgcgtcatcctgggtaaatccacgcacgcgcatcaggccatgcaggctaccactcggctcgttacggtggcagctaccaaactcggccatacgcagcggcagatcgcgataagacttcagcccctggttgaaaatttgtacgtgacccgggcagttcatcggcttaatgcagtattcacggttctcagaagatgtggtgaacattgcatctttgtagttgtcccagtgaccggttttttcccacaggacacggtccatcatgaacggacctttaacttcctgatactggtactctttcagtttagaacgaacaaacacttccagttcacggaagatggtccagccgtcgttgtgccagaataccatacccggcgcttcttcctgcatatggtacaggtcgagctgtttaccgattttacggtggtcgcgtttcgcggcttcttccaggcgctgcaggtaagcgttaagtgcttttttgtctgcccacgccgtaccgtaaatacgttgcaacattttgttgttgctgtcgccacgccagtaagcccctgccgttttcattagtttgaaatgatggcagaaacgcatgttcggtacgtgcggaccgcggcacatatcgacatattcttcatggaagtacagacctggcttgtcatcatgggcgatgttttcgtcaagaatggagactttgtagctctccccacggttggcgaaagtttcacgcgcttcgtgccagctgactttcttcttaatgacgtcgtagtttttctcagcaagctcatgcatccgcttctcgagtgcttcgacatcttcctgggttaacgtgcggtcaagatcaacgtcgtaataaaaaccgttgtcaataaccgggccgattgccattttggtatgcggccaaagttgtttaatcgcgtgccctaacaggtgcgcacaggagtgacgaatgatctccagaccttcttcgtctttggcggtaatgatgctcagttgtgcgtcgttttcaatcagatcgcaagcatcaaccagttcgccattaacgcgccctgcgatacaggctttcgccagacctggaccaatgtccagcgcaacatccatggggcttacagcgtgatcgtaatggcgttggctgccatcaggaagagttataacaggcattttatatccttatttgcagtggtgacccacacgaaagatcacatacaaagaaaaatttgtttattaacagttcattgcgaaaccatctagccaacaaatgctaaattggttcgcaatcaggtacacaaatgaaagacattaacctctcaccttccacccggttgagcgatgttaacactaaaaaaagggagattgtacctttccgtttcacattgattcgattcgcaattcgtttgtagtgagtacaccagcaaaacgcttaaagaacaactgataacatcacggtgcgtctgaaaggtttactgcgagcggatttacagcagcataaactgaatccagcaaagttcgttgcgtgatttggcggtagtattttaaacgctcatgagattaatgacgaagtggtcatatcacaatgataaaagtgacacaattcttataacaatttttcgtgcacatttcgttctggcgataataattaatcatcatcctcaaaacctccagatatatataaggcgaacagattatgagtcaaaacgatatcattatcagaactcattataagtctcctcatagattgcacatcgatagcgacataccaacaccttcatcagagcctattaatcaatttgcgcgccagctcatcaccctacttgatacctctgacttaagttcgatgctgtcatactgtgttactcaggaatttaccgcaaactgtcgaaaaatatcacaaaattgttattccactgccctttttaccattaactttgccacttcacccatccatacagaaaatatactcattacattacactataaaaaagaaatcatttccttattactggaaaccacgcctattaaagctaaccatttgcgaagcatactggattatattgaacaggaacagttaactgctgaagatcgtaaccattgtatgaaactgtctaaaaaaatccatagagaaaaaaactatacacccaacagtaaatctcaatggtagtgcatgttttttgcaatctccttctgacgctattttttgtcgccatctgtcattgcaatacgcccttgattcattgagaaatggaaaaggcaaagtcaacctgattaaacattactcctccgttgaatccatacagcagcatgtccccttagtccgggacgcggagttcagagcattacttcgccatcctcctgcagggagtcgcgttatcgcgagtaaggattttggcttcgctttagatattttcttttgtcgaatgatggcaaacaatgtcagtcatatgtccgcgattttatatatagacaatcatactttgtcagtaaggctacgaataaagcagtcagtgtatggacaattaaattatgttgtgtccgtttacgacccgaacgataccaacgttgccgtcagagacacccacaggacagcacggggctttctttcgcttgataagttcatcagttcaggtcccgatgctcagacctgggctgatagatatgttcgcaactgtgcaattgctattctgcccctattacctgtgggagttccaggggctattttcgcgggtattgcatcacgaatgccatttgcccctatacatccatcggcaatgttgttaataatggctacaggccagtctcaacagcttattacattattcaaacagttgcccatactccctgaaaaagaaatcattgaaataataactgcgcagaatagcgttggtacacctgctttatttttggctatgatgaacggacatactgacaacgtgaaaatatttatgcaagaaattcagtcactggtagataatcacatcattcatgaagataatctggttaaattactgcaaactaaaagtgctaacgaaacacctggactttatatctccatgttgtatggattcgatgaaataatcgatatctttctgaatgcattaaccactccaatagcacaagagcttttaaacaaaaaactggtgatgagtattttagccatgaaaatacatgatggtgagccaggattatacgccgcaatggaaaataatcaccctttgtgtgtcacacggttcctctctaaaattaatggcatcgcctttaaatacaagttgagcaaagctaacatcatggatttattaaaaggagctacagcacagggaacccctgcattatacatcgccatgagcaagggtaatgaagacgtcgtgttatcttatatatcgacgctgggtgcttttgcaaaaaaacattcttttagtcaacatcagttatttacactattggccgctaaaaatcatgacaacatgtcagctgttcatatagccattcatcataagcattataaaactgtagaaacatattatgctgctattaatgcaatcagccaaagcctgagttttagtgctgatgaaataaagacgtatttataaccagctatttacgatatatatcgatacataattttatttttttcataaaacgcagaaacagtgaccatgtgcacaacgccacccgacggctgtaataacaaaaaatcccttgatgcctgtcccttttgttacactccgttatcacgcacaagagatatgcaggacactggtatgccgactaaacgctttgataaaaaacactggaagatggtggtggtgctactggcaatctgtggcgctatgttgttgctacgttgggcagcaatgatttggggctgagcagtgacaaacgaagacagccagaccgcataacacggtccggcagataattttacatgctgtagcccaggcttaaggttgtccgacggtcggtatgttccggtgcagactctggaggttcagagttccatgtgacgttgtaagccaccttcagtccaaaatgttcattaatagcaacatttaatgcgctttcggagttcagcgttgtgtcttccgcgccaaagacgctaacaccctgcgtaaatttagcgttgtcagtcaactgccatgcataagccccggaggcatagcccagcggctgggtttcactggcattgtcggtatatttgtcgtaacgcacacctggaccgaattcaaagcggaaactgtgtaccgggccattcaaaaactgacgaccataacccgcggtcaacacatcgcgctctcgatagccgttataacggtctgtcagccagcttgcctgaccaaataaatagtcataatcagttaaattaaaacggctacgcccgcccgccgcatatttttcactagaacgctcatcattagaagaagtattactggcgttcccccacaggctccaggcagtggtgtgtccataccaggtcatggtggtgtcagccgtaagactggagcttttcgtattgccactttgtgcaagatatcctgcgttcagattaccttcgaaaggttttttagcgctggcaggatcatccatgacagtaaaaacggaatcatcggcagctgcattcagactcgcaaacatgccccccgccaacataacgatggcaggaactgtcttcaaaagcttcatttatcaagagtccgtacaacaaaaaaagagaccatcgcggtcccggaaactttcttaaggatcaaagattagcgtccctggaaaggtaacgaattataaaaaggcgcgaataacttagcaatgtattcttatttcattttttgaataagcatgtggcgaaaacagatttttatttatatatatttatctgcaaaattttaaataaagctccaataaatcatattgttaatttcttcactttccgctgattcggtgccagactgaaatcagcctataggaggaaatgatggtacgtatctatacgttgacacttgcgccctctctcgatagcgcaacaattaccccgcaaatttatcccgaaggaaaactgcgctgtaccgcaccggtgttcgaacccgggggcggcggcatcaacgtcgcccgcgccattgcccatcttggaggcagtgccacagcgatcttcccggcgggtggcgcgaccggcgaacacctggttagtctgttggcggatgaaaatgtccccgtcgctactgtagaagccaaagactggacccggcagaatttacacgtacatgtggaagcaagcggtgagcagtatcgttttgttatgccaggcgcggcattaaatgaagatgagtttcgccagcttgaagagcaagttctggaaattgaatccggggccatcctggtcataagcggaagcctgccgccaggtgtgaagctggaaaaattaacccaactgatttccgctgcgcaaaaacaagggatccgctgcatcgtcgacagttctggcgaagcgttaagtgcagcactggcaattggtaacatcgagttggttaagcctaaccaaaaagaactcagtgcgctggtgaatcgcgaactcacccagccggacgatgtccgcaaagccgcgcaggaaatcgttaatagcggcaaggccaaacgggttgtcgtttccctgggtccacaaggagcgctgggtgttgatagtgaaaactgtattcaggtggtgccaccaccggtgaaaagccagagtaccgttggcgctggtgacagcatggtcggcgcgatgacactgaaactggcagaaaatgcctctcttgaagagatggttcgttttggcgtagctgcggggagtgcagccacactcaatcagggaacacgtctgtgctcccatgacgatacgcaaaaaatttacgcttacctttcccgctaacaaaaacattcccccagcattgggggaatcatcaccaacctgtcggcaacgcgtttctccgactatgctcaaaagtcatgtgataacaaaggggtgaactatggccagtggcgatcttgtccgttatgtcataaccgtcatgttgcatgaggatacattgactgaaattaacgagttgaataattacctgactcgcgacggttttttgctcactatgacggatgatgagggaaatatccatgagctgggaactaacacttttggacttatcagtacccaaagtgaagaagaaattagagaactggttagcgggcttacccaaagtgcaaccggcaaagatcctgaaatcaccatcacgacctgggaggaatggaatagcaacagaaaataaatggtttttgggcaataatcagtctgtggtgtgcgttagctcgtgtttttacaccgcattcttgcgctaaccttatgatctggcagacaacatgggagagacatcatgtggcaggcaatcagtcgtcttttgagcgagcagttaggtgaaggcgaaatcgaactgcgtaatgaactgcctggcggagaagtccatgccgcatggcatttgcgctatgcaggacatgattttttcgtcaaatgtgatgaaagggaactgcttcccggttttaccgccgaagccgaccaactggagttactgagccgtagtaaaaccgtcaccgtgcctaaggtttgggcagttggcgctgaccgtgactacagttttctggtgatggattatctcccacctcgtccgctggatgcgcatagcgcatttattcttggtcagcaaattgcgcgtttacatcaatggagcgaccaaccacaatttggccttgatttcgataacgcgctctccacaactccacagcccaacacctggcaacgtcgctggagtacgttttttgctgaacaacggattggctggcagttggaactggctgcagaaaaagggatcgctttcggcaatatcgacgccatcgtcgagcatattcagcagcgtctggccagtcatcaaccgcagccttctctgttgcacggcgatttatggtccggcaactgtgcactgggtccggatggcccgtacattttcgacccggcctgctactggggtgaccgagagtgcgacctggcgatgttaccgctgcatactgaacagccgccacaaatctatgacggctatcagagtgtatccccgctacctgccgatttccttgaacgtcaaccggtttaccaactctacacgctgttaaatcgtgcaaggttatttggcggtcagcatttggttattgctcagcagagtttggatagattattagcagcatgatatgggttgaggataatggccgctccgtgcggccttttgattaaataaacccaagcagagaaaagaacacataacctgcagcaatacaaataaccggcaggatatacagactgaaaaactgcaggaaaatagtatggtgcggaacaacaatacgggactcaatttgttcacgcgttagcccctcttcccctttggctttttccagaatgagttgatcttcaacaccttcccgcaagaagcgcgcctggcgactcatccgggcaccggaatcctgcaacgccagtccgacaaaaatcaggatgaaaatcacccagaacataacgttcacgccaccattaaaattgggcgtcggggagttataccagaatagattcaaaaaaggcgtattcgcctgcatcatatcgatcatgacatgagtaaagtcgagcatgaccgcattaatgccttccttgttttcctgccgggtattcataaatttcagcaaagaaatcaatgtagagatcaatgcaggtataaaaatcacccaacccaaaatccttttcaaaacagcaatgcgtccagcttgttgatacgtcatgagttctccttgattaagacgcgtcgtttcacttagtttacctgtagatatctgttttcgcccattctttaaaggcgatatgataggcgcttaatcataagcacggcttaataccttacacataatgctctaaaggagaggttgtaatgagtaccccgcgtcagattcttgctgcaatttttgatatggatggattacttatcgacagtgaacctttatgggatcgagccgaactggatgtgatggcaagcctgggggtggatatctcccgtcgtaacgagctgccggacaccttaggtttacgcatcgatatggtggtcgatctttggtacgcccggcaaccgtggaatgggccaagccgtcaggaagtagtagaacgggttattgcccgtgccattagtctggttgaagagacacgtccattattaccaggcgtgcgcgaagccgttgcgttatgcaaagaacaaggtttattggtgggactggcctccgcgagtccactacatatgctggaaaaagtgttgaccatgtttgacttacgcgacagtttcgatgccctcgccagcgccgaaaaactgccttacagcaagccgcatccgcaagtatatctcgactgcgcagcaaaactgggcgttgaccctctgacctgcgtagcgctggaagatagcgtaaatggcatgatcgcctctaaagcagcccgcatgcgttccatcgtcgttcctgcgccagaagcgcaaaatgatccacgttttgtattagcagacgtcaaacttagtagcctgacagaactcaccgcaaaagaccttctcggttaatgaccaggggcagtgatctcgctgcccctggttctttatctgaaattgcattcaactgacggattaatcgtcaatttaagagaaagagttacaccgtcaccacttccgtgcactgtataaaaatcctatactgtacgtatcgacagtttagtgagttttatcatgacggcggaaggtcaccttctcttttctattgcttgtgcggtatttgccaaaaatgccgagctgacgcccgtgctggcacagggtgactggtggcatattgtcccttccgcaatcctgacgtgtttgttaccggacatcgatcacccaaagagctttcttgggcagcgattaaaatggataagtaaaccgatcgcccgcgcttttgggcatcgtggttttacccacagtctgctggcggtatttgcgctgctggcaaccttttaccttaaggttccggaaggctggttcattccggctgatgcgctacaaggaatggtgctgggttatttgagccacatacttgccgatatgctgacacccgccggtgttcccctgctctggccatgccgctggcgtttccgcttgcctatcctggttccccaaaagggcaaccaactggaacgttttatctgcatggcattatttgtctggagcgtatggatgccccatagtttacccgagaacagcgctgttcgttggagtagccaaatgatcaataccttgcagatccagtttcatcggcttattaagcatcaggttgaatactaaaaaggcaaaaatcacctttctggaataagcaattccatttgaatataagagccagctcacagttctgttaatcttgcgccaacactatgactgctacgcagtgatagaaataataagatcaggagaacggggatgaactttccattaattgcgaacatcgtggtgttcgttgtactgctgtttgcgctggctcagacccgccataaacagtggagtctggcgaaaaaagtgctggtgggtctggtgatgggtgtggtttttggccttgccctgcataccatttatggttctgacagccaggtacttaaagattctgtacagtggtttaacatcgttggtaacggctatgttcaactgctgcaaatgatcgttatgccgttagtcttcgcctctattctgagcgcggttgcccgtctgcataacgcatctcagttaggcaaaatcagttttctgaccatcggtacgcttttgtttaccacgctgattgcggcgctggtcggtgtgctggtcaccaacctgtttggtttgacggctgaaggtctggttcagggtggtgcagaaactgcacgtctgaacgccattgaaagtaactatgttggtaaagtctctgatctgagcgttccgcagctggtcttgtcctttatcccgaaaaacccgtttgccgatcttaccggagccaatccgacgagtattatcagcgtggtaatttttgccgcattcctcggcgtagctgcattgaaactgctgaaggatgatgcgccgaaaggtgaacgcgtcttagccgctatcgataccctacaaagctgggtgatgaaactggttcgcctggtcatgcagttgaccccttacggcgttctggctctaatgaccaaagtggttgcaggttctaacttgcaagacatcatcaaactgggaagtttcgttgtcgcgtcctacctcggtctgctgattatgtttgcagtgcatggcattctgctgggcattaatggcgtgagtccgctgaagtacttccgtaaggtatggcctgtgctgacgtttgcctttaccagccgttccagtgctgcgtctatcccactgaatgtggaagcacaaacgcgtcgtctgggcgttcctgaatccatcgccagtttcgccgcctctttcggtgcaaccattggtcagaacggctgcgccggtttgtatccggcaatgctggcggtgatggttgcgcctacggttggcattaacccgctggacccgatgtggattgcgacgctggtcggtattgttaccgttagttccgcaggcgttgccggtgtcggtggtggtgcaactttcgccgcactgattgtactgcctgcgatgggcctgccagtaaccctggtggcgctgttaatctccgttgaaccgcttatcgacatgggccgtacggcgttaaacgttagtggcagcatgacagctggcacgctgaccagccagtggctgaagcaaaccgataaagccattctggatagcgaagacgacgccgaactggcacaccattaattcttatgctggcaacggtccgttttgtataggggccgttgccttactttttaaatgttccatcgcggcgatgcatacactctcatatttaaacagatcgtcagcgaaaaaaatgtccaacttatcaatacattcctggctcaaactatgtgcctgtaggctgaagcttaaaacctcatacccgagacgttttctaagactactatctggaatactcataatatcttcaagcacaccacttcccattcccggaagatttagtggattaaaaagaagattgatattaagcatacttattatgctaggaaactttaggagactctcatttttttgaatcgcagcaaaaatgctcccgacaggatgtatataattttgttcatagtatatagtccttaaatagtgaataaccaacctgttttttatactgatcaaattggtcattttttctgggcgaaatacagaagtgacatccattccaataaaatctttatttatacctcttatccgaatttcactaccataaagattattaattattactctatatttaacattgtcctgcagatatgtatcaaaactaagtgctggcgctcctggcttactggcatcatagttaatgttagacatataggcaatcatataattaaagttactttctgctatttcatcgcagtcacattgacccgtacttataaagaaagtgagtgctgtcatagtagactgcagcctttctttaaaagagtcgaaagccaggcttttaatatttaaatcaccataattactctgtattaagtttgtagaaaacatctcccgcctcatattgttaacaaaattattatctcatttaaatctaagtcatttacaatataagtttaagagcgacgccacaggatgaactatcaaaaatagctcatcatgattagcaaaacttaaccattttaaaataaataaacaattaaagaaaaaagatcacttatttatagcaatagatcgtcaaaggcagctttttgttacaggtggtttgaatgaatgtagcaacgaaatacagaatttcaggtcatgtaactcccggcaaaaccgggaggtatgtaatccttactcagtcacttccccttcctggcggatctgatttgcccaacgttgggcagattcaggcacagtaaacgccggactgcgcagaaaactctctcccatcagtacaaacgcaacatatttgccacgcagcatccagacatcacgaaagctatccatctttatcgcatgttctggcggcgcgggttccgtgcgtgggacatagctaataatctggcggttttgctggcggagcggtttcttcattactggcttcactaaacgcatattaaaaatcagaaaaactgtagtttagccgatttagcccctgtacgtcccgctttgcgtgtatttcataacaccgtttccagaatagtctccgaagcgggatctggctggtggtctatagttagagagttttttgaccaaaacagcggccctttcagtaataaattaaggagacgagttcaatgagccaacataacgaaaagaacccacatcagcaccagagtccactacacgattccagcgaagcgaaaccggggatggacagtctggcacctgaggacggctctcatcgtccagcggctgaaccaacaccgccaggtgcacaacctaccgccccagggagcctgaaagcccctgatacgcgtaacgaaaaacttaattctctggaagacgtacgcaaaggcagtgaaaattatgcgctgaccactaatcagggcgtgcgcatcgccgacgatcaaaacagtctgcgtgccggtagccgtggtccaacgctgctggaagattttattctgcgcgagaaaatcacccactttgaccatgagcgcattccggaacgtattgttcatgcacgcggaagtgccgctcacggttatttccagccatataaaagcttaagcgatattaccaaagcggatttcctcagtgatccgaacaaaatcaccccagtatttgtacgtttctctaccgttcagggtggtgctggctctgctgataccgtgcgtgatatccgtggctttgccaccaagttctataccgaagagggtatttttgacctcgttggcaataacacgccaatcttctttatccaggatgcgcataaattccccgattttgttcatgcggtaaaaccagaaccgcactgggcaattccacaagggcaaagtgcccacgatactttctgggattatgtttctctgcaacctgaaactctgcacaacgtgatgtgggcgatgagcgatcgcggcatcccccgcagttaccgcaccatggaaggcttcggtattcacaccttccgcctgattaatgccgaagggaaggcaacgtttgtacgtttccactggaaaccactggcaggtaaagccagtctcgtttgggatgaagcacaaaaactcaccggacgtgacccggacttccaccgccgcgagttgtgggaagccattgaagcaggcgattttccggaatacgaactgggcttccagttgattcctgaagaagatgaattcaagttcgacttcgatcttctcgatccaaccaaacttatcccggaagaactggtgcccgttcagcgtgtcggcaaaatggtgctcaatcgcaacccggataacttctttgctgaaaacgaacaggcggctttccatcctgggcatatcgtgccgggactggacttcaccaacgatccgctgttgcagggacgtttgttctcctataccgatacacaaatcagtcgtcttggtgggccgaatttccatgagattccgattaaccgtccgacctgcccttaccataatttccagcgtgacggcatgcatcgcatggggatcgacactaacccggcgaattacgaaccgaacagcattaacgataactggccgcgcgaaacaccgccggggccgaaacgcggcggttttgaaagttaccaggagcgcgtggaaggcaataaagttcgcgagcgcagcccaagctttggcgaatattattcccatccgcgtctgttctggctaagtcagacgccatttgagcagcgccatattgtcgatggtttcagttttgagttaagcaaagtcgttcgtccgtatattcgtgagcgcgttgttgaccagctggcgcatattgatctcactctggcccaggcggtggcgaaaaatctcggtatcgaactgactgacgaccagctgaatatcaccccacctccggacgtcaacggtctgaaaaaggatccatccttaagtttgtacgccattcctgacggtgatgtgaaaggtcgcgtggtagcgattttacttaatgatgaagtgagaagcgcagaccttctggccattctcaaggcgctgaaggccaaaggcgttcatgccaaactgctctactcccgaatgggtgaagtgactgcggatgacggtacggtgttgcctatagccgctacctttgccggtgcacctagcctgacggtcgatgcggtcattgtcccttgcggcaatatcgcggatatcgctgacaacggcgatgccaactactacctgatggaagcctacaaacaccttaaaccgattgcgctggcgggtgacgcgcgcaagtttaaagcaacaatcaagatcgctgaccagggtgaagaagggattgtggaagctgacagcgctgacggtagttttatggatgaactgctaacgctgatggcagcacaccgcgtgtggagtcgcattcctaagattgacaaaattcctgcctgatgggaggcggcgcaattgcgccgcctcaaatgatttacatagtgcgctttgtttatgccggatgcggcgtgaacgccttatccggcctacaaaactgtgcaaattcaatatattgcaggaaacacgtaggcctgataagcgaagcgcatcaggcagttttgcgtttgtcagcagtctcaagcggcgcagttacgccgcctttgtaggaattaatcgccggatgcaaggttcacgccgcatctggcaaacatcctcacttacacatcccgataactccccaaccgataaccacgctgagcgatagcacctttcaagctcgcacttgtcaacacatccagctccgttaagcgtgggaaacagtaagcactctgacggatagtattatcgataaacgccggatgacacatcacctccaggctacgatcaccccgatggcctgcgtcatccagcacttgcaggaacaggctctcactgatctcttcaccgtagaatgcactgctgaatccctgggtagtgcgcaggttgaccggcaaatcaaacgccatctgacgatccgcccgcaacgcaatgccctgctctgccgcaaacctggcaacaatcgggaaaatctgcgggaacatatgcacatgatgatggctatcaagatgcgtaggtttgcgtccaaatagctcaatgaaacgcaaatactgactgacaagctcctgagtaatttcttccagcggtaaagcatcttcttctgccaactgccagatccattttcccagcacaccatcgcgggttaaccccggcatagctgtcagtggcttacccatagtaaggacaaagtgcatccctatggccagactcggttcatcacgactcaactgcaccgcatggtcaatagcctgcccattcaccagcgccgtcgtgctcgtgacaatcccattgcgacaggcctcgataatgccgtagttctgacctttgcttaagccaaaatcatcggcattaacaatcagtaagcgttccataatcagcctcggttaatgtgcttttttaagctctgcgatgcagtcggcaaagtttggcagccatttctcgtgcgccagaatcatctcgcgtgccagcagctcagcatcgcgatcggaatgcaccaacggactaaggtttagcgccagtaacacatcgttaaattctccgctaagtgcggcgttactggcagcaatctcgaagcctttaatggtgtgaatcagccccattactttatcatcgaaatgcgtaatgcgcggatgtggcgtcgcgccatcgcgccccagcttacaggtcatttctactgcccagtctgccggaatattatcaatctgcccatgatgcgggatattaacgtaatgttctgcttgcttgtcgttgtagatagcgttgatcacttcgcatgctgcatcagagtaataagccccaccgcgctgttccagttctttcggcttaactttcagctcaggatttttatacagctcaaaaagttgtttctcgactttctgtactacctgcgctcgtgcgccgcctttgtagtattcgcccatttcaatagccagcatctctttctgcttgaagtaatacagcagataagaacatggcagcagattcaagctacgaattaagccctcactaaatggcagatcgaaaatattttttacagaggacgcttttaactgcccactcgccacaccatcaagcaattcggcaaagcggctcttgccatttatcagcacatccttaatgaacaccatatggttgaggccgaacaaatcgatagataaatcatcgctgtctttcagcatcagaacatcgcgaataaacatcttcatgccgatcggaatattacacacgccgataaagcgtttaaatccggtatgacgataaacggcttcagtgaccattcccgccgggttagtgaagttaatcacccatgcattcggacaaagttcttcgacatcttttacgatgtcaaaaatcaccggaatggtacgcagacctttaaacaaaccgcccgcgccgttggtttcctgaccaagataaccatgacttaatggaatacgttcatccagttcacgcgccggtaattggccaacgcgcagttgggtagtaacgaaatcagcatctttcaatgcttcgcggcgatccagcgttttataaagcttcatcgggacgccagcgttatcaatcatccgttggcagagatcgaaaataatatccagtttcggtttaccaccttcgacatccaccagccataattcgctgaccggcaattcgtgataacgcttaataaatccttccagtaactccggggtatagctgctcccgccaccaatagtgacgacttttaatttctggctcataatttctcccttcagtacagaatactgatatctggcatatctgccccccggacataaataatccagcaacaggacagatatgtgaattgtcaggtataacgacttgctgattaaattcagtcaatttcttacgatagctcttaggcgtaaaggacgttaatttcttaaacgttttaataaacaaactcgggctactataaccggcctcaaacgcaatatccgtcacactatagttggtcatttccagttgttttttggcaaaattaatacggatttcattaataatctgcattggcgttttgccataatatcgttgagtcgctcgcgtcaaatattcctgacttttggcactcaacgccaccatattctccagcgcgctttcactaaactgctctttatcatgcatcttttctaccgtacttttcagccactgcggtacatcatcaatcacctgttcttcgcggtaatgacgtaaacggttaatgacataaaaagtaaccatctcaacaaactcttccagccctgtttcgcggaaattcaaactagaaatcactgtttccacataggtgagaaaagcgttattggtccggtatacctggctagcgacaaagcaataaggcaacaatggcaggtaatgctgctcaaaaaagcgtttactgatcccaacgttcaatatgcgcgtggcaccaaactcataaaaactttgatggtggctacctaacgaaataaaaacaaaatcgccccgttccagtaacacgcgcttaccgttaatctcctggaaataacgcccggttaataccagagtaaattcataatagtcgtgctgatgcagtccgctgatactctcagttttgttatagataaacacatggaagtttttgccattaaacaactgctgttctcgggcagtggcaatttccggcgcgttaatcactggctgcatcatcgactccttatgccttcagtttttcatgaagctcaattaattcagtaatcagttcacgcgcaagcatggacgtcattaaatgatcctgagcgtggaccagcaccagactcactttcatcttaccttcgcccgcatcgccttcaatcagtttcgtctgtaccagatgcgcttcattcaatgccatccgactctgatccatcatggcttttgctgcggcaaaatcgccctgcttcgcctgtttcagtgccgcatacgccaggctgcgcgcttgtccggagttgatgatcagccccatcaccacttcttccagctcttcagcttccgtttgcgtatcgggaatgttatcgagatccatcatacatcgttcctctcttttcttaccggcacgattacccgtaccggcatcgattaaaatttcagggcgttagcgatatcttcttcgctctcttctttatcaatcgcattttgtgctttgttagccaccacaacaaagggcagataaattaacgttgcgatgccaaggttgaagagtgcgaccagcaatgcggcgacgctaccgttggtgttaaagaaggctcccagaccggttggcatggtccacggtgcaatattggtcaccggaggaataatgcccatgtagtacgctgcgagggtgattgccgccagaatcggttgtaccagtacaaacgggataaacatcaccgggttcatgataattggcagaccaaacagaatcggttcgttaatctggaagatgccggacggcagcgccagttttgccacctgacgataatcagcacggcgagaggcgataaagatagccaggatcaggcctaaagtcgcaccactgcccccaaggaaaataaaggagtccagcatcggcttggcccagatatggaaggtcttaccggctgccagcgccgcttcgacggaaccatattgctgataggtcgcgatattttccagtgcccacggcgtcataatgccgttgtccagtgcggtcagcgccagcgcgccatgaataccgaagaaccagagcagtggaacaaagatcacataggcccagcccaccacgctacccaagcttgccagtggggtactgatggtatccataatgatctgatggaagttggtgccccaggtattcaacgcccaggcaataatccccatcacggaaagaataataaagccgggaattaatgcgctgaaggaacggcttacactagcaggtacgctgtcgggcagtttaatgacccaattgcggcggacaataaaggtaaacatttctgccaccaccaggccaataataatcccggagatgatattcgccccacctaaccagtttgcaccaaccgcataggcctcaccgacactatatggggtgacggtcataaatgctgcaacggataacaacccagccgccagcgcatcgactttacgctcttctgccagcgccatgccaataaagaacggtgccattaaagacattattcctaatgttccgttatatacgttgccgccaatacctttcagaccattaagtgtttcaatggtactggcgtcgaggcgaatacctaaggaataaaaaaagctcccctccccaaagcttagaaaaacgttgttaattaatacaaacatggcccccgcaagggttaacggcattaagcgaataaagccatttttgattgcattaacgtgtggctgctttcctattttaactgcaaaagggaggagtaccttttcaaggcttgcaataacattactcatagaaaaatacccttaaaaaccgcaatttaaatattgcggtattgatttatgaaataactctttgacgggaaaatttaaaataaattaatttgctgcggcttttttaatcgctgcaaccgcagccttaagcacgcctaaaccatcgactttgccataaagcaggctgtcaattacttcaaccggtttgttgggtaacaaacgctggatttcgggcaacatataagcaatctgcggccctaataacacgacatcggcattctgacctttttcaccagccagtgtttccggaaatgcttcaataatgaccggaacttcatatttttctgcctgtgcgcgcattttacttaccagtaaagaggtagacatgcccgcagaacaaaacagataaatgtgtttcttttccataaaactgccctcatcgacgattatctgtcagccagacactccgcaagccttaacctgcttccatgctctgggtaacttgcgaaaccaacatgactttttttgtggctgaaaggagtatacggtatagacctgagcaatagtatttctttgaccttataaattgtttctccttgacctgtggttatgaccctcttcacatttcgggcaaataattcgcgaagataattaagaactcaggccaaaaaaaaccggcgcaatggccggtttccgttgttactcaagctttcagacgaattgattacttcgcagcctgtggatcagtgtcgtattcagcacaggtctgataaccggagttgatgacatatccggtatcatctaacgcgacaaagtaggtttctgctttaccatcacgttgacccaggatgtaggtctggcaagtaccgcgagcatggatcatgctcacttcagagctaggtttacccgcaatttgtgcaacctgcgcccggctcatgccttttttgacgtctttcaccacaggctgtacaaactggtctttggtacgatcataagccgtacaacccgccagcatggttaataccgccgctgcactcagaattcctgccatattcttgttcatattccgtcctcttgtttatcagcgtgttagataagcctggaatacattgggcgctttttcaagcccgtgaacgaaacggctccgctttcagaggattcctgtatgacgttttaaccaccattcagcccgctgtcgcttgtcgtttcagtagcaacgggttagctttaaggaagttttgtcttttctgtctggaggggttcaatgacattgcaacaacaaataataaaggcgctgggcgcaaaaccgcagattaatgctgaagaggaaattcgtcgtagtgtcgattttctgaaaagctacctgcaaacttatccgttcattaaaagtctggtgctcgggatcagcggcggtcaggactccacgcttgccggaaagctgtgccagatggcgattaatgagctgcgcctggaaaccggcaacgaaagtctgcaatttattgccgtacgcctgccctatggtgttcaggccgacgaacaagattgccaggatgccattgcctttattcaaccggatcgcgtattaaccgttaatatcaagggcgcggtattggccagcgaacaggcattgcgggaagcaggcattgaactgagcgattttgtccgtggcaatgaaaaagcgcgtgagcggatgaaagcacaatatagcattgcgggtatgaccagcggtgtcgtggtgggcaccgatcatgcagcagaagccattaccggattcttcactaaatatggtgacggcggtacggacattaatccgctgtatcgtctcaacaaacgtcagggtaaacagttactggcggcattagcttgcccggaacacctttataagaaagcgccaacggccgatctggaagatgatcgcccttctctgccagatgaagtggcactcggcgtgacctatgacaatatcgacgactatctggaagggaaaaacgtacctcaacaggtcgccagaacaatagagaactggtatctgaaaaccgaacataaacgccgtccgccaattaccgttttcgatgatttctggaaaaagtaataatttgcacatattggattgtgcgaaaaagagtaatttgttcacgccggatgcggcgtgaacgccttattcgacctataaaactatgcaaattcaatacattgcaggagtcgaataggcctgacaggcgtagcacgtcagacggtgtaacctttgtcatcgacccgcctcttttttaatcgcttcccgcctgttacactggatagataaccagcattcggagtcaacagtggtacggcgtttaacttctccgcggctcgaatttgaagctgcggcaatttatgaatatcccgaacatttacgtagtttccttaatgacttacccacccgaccaggggtgtatctgtttcatggtgaaagtgacaccatgccgctctatatcggcaaaagcgttaacatccgcagccgcgtcctttctcatttacgtaccccggatgaagccgccatgctacggcaatcccgacggatcagctggatatgtaccgccggtgaaatcggcgctctgctccttgaagcgcgattaatcaaagaacaacagccgctgtttaataaacggttgcgccgcaatcgccagctctgtgccctgcaattaaatgaaaagcgcgtcgatgtggtgtatgccaaagaggtggattttagtcgagcccccaacctgtttggcctgtttgccaataggcgcgcagctttgcaagcattgcagaccatcgctgatgaacaaaaactttgttatggcctgctgggactggaaccgttaagtcgcggtcgtgcatgttttcgtagtgcgctaaaacgttgcgccggagcatgctgcggtaaagagagccatgaggaacatgcgctacgcttgcgccagtctctggagcgtttgcgggtggtgtgttggccttggcaaggggcggtggcgctgaaagaacagcacccggaaatgactcaatatcatattattcaaaactggctgtggctgggggcggttaatagcctggaagaagcgacaacgttaattcggacacccgccgggtttgatcacgacggttataaaattctttgtaagccgctgctttccggtaactatgaaattactgaacttgatccggcgaatgaccagcgagccagttgattactgaacttgatccgggctatgaccagcgagccagttgatttcactgaacaacagtttaccttgcggttgtaaaagccgcagggtgtgcctgccatcgaaccagcacgcgccctggtcggtagtgagcaatttatcgcccagttgccacgccccgttaatcacaaacaccaccccgccgcgactgccaaaggtagtaaacgtacgttcggcaattctgactttcgccttacagacatccaggcgtgtcatgatgttgaaatccatgctcatctgccctgccgtcagtttcgcttttaccacctggtccgctgcaaaggcaaaaggctggaacggttttaaggtatggttaaagcggtctgcgctttcaaggagcatctcgccgccttccagcaacgtcactatcctttccatgccgggaaacaaagaaaactccccattcgccgcgatggatgcaatgctggcacgccagtaaaaatcacgttttgccggtgggaacgtgcaaatttcgcgcgtttcaccggcagcatttcgccacagattcacgctcattttacgcatatcaaagtattccatactcgctcccggcccgttcttttcattgttatcgttcaggtaaccgtggatggttatcggcaactcgggtgatttacgttagtggtgatcaggctttttttacaactgtttgagaagagaaaagaaaaccgccgatcctgtccaccgcattactgcaaggtagtggacaagaccggcggtcttaagttttttggctgaaagattattcagcagttgcaggcattttaccttttgccgctggacgttctgtcagacgcttctcaaaattagcattaaattgctttttctgttccggcgtcaggatgttgtaaattttgttctgggtttccatgtgcgccagcatgttagctttgcgctgttcttccatttttgcgatctgcgcttcagcttttactttatcgaaggtatcgctggcaatgatgtcatgcattgcgcggcgttcttccagcggcggacgtttcatctggtcacgctggcctttcatgatttcgcggatctgctgtttctgcgcgtcggtcaggttcaggtctttgaacatcatgtcctgatgcggaccgaacttgcctttgtggtgcatcatcggcttcgcgtcagccggtgctgcggtagtggtgtctgcggcatgggccaggttagccgcgccaagagccagggtagaggcaacaaacagtgcagttaatttacgcatattctatatccttcctttcagttatttattacggctttcttaagtagcgtgccgtgttgacgagattaactttactgactttagcgtcaattaatcagagcaacggtaaaacaatgaaagtgtaaaaaacacttttgcgccaattatggagaaaaaaagaaaatttgatggagagtgatgagagaatattacaacacgatgattttgcagagattatgaagaactataccggatgactggtgataaataaagcaaataaccaggattaatctgtattaatttataagaaagcaacttaatacccgcagaatgatttctgcgggtaagtattagcttattttttcgagcattaatcccgcgcgtaatcccaacgctaccaacggattagggaataacacatactctacatcatgggttacggtaaaacgttcctctccgtcctgcgccagcaatgttcctttctcaaacggcataaaattcagcgtgtcacttgccatatgcatttcgaaggacgggctgtggcgagtaatttggctaaccacccgataacggagcggcggtgttctcacgataccgacactctcaccagatagcagcgcagcaattgcgctggcagttactgcaaactggcgaagatcgttttgcccaaagggcaacgctttgccaagttccagcgtacaggccagcgcgccaaaatgtctggcgctgaaatgggtaaacgtaccaccaggttcctgatggaacaccagcgcctccagccccgccgcacccagccacgtcagaaatttctcgtcccagggaatgtcgcgttgcggtaatacaccgaactgcggatgcaaggagccacgaattgcggtatgtagatcaaggtgccagcgcacagattctttgccctggtcataaaaatcttccaggcactgttccagttcgcgcgcccgacaggtttctccgctttcagcaaatagctgccaacgaccgccaaacattcgattcatatcgctatggcaataacgtttcccttgcttcagcgcaggaggattcccgaggatcaccagcaaccgccaacgtaacgggatctcgccgtgagatatcgcgccaagcaacgcgtccagcatctccacaggtgccgtctcattaccgtgtattcccgcactaatcaccagtgcgccttgcggtggcgttaatggcgtcagttccagcacaccatcgcccagccagcgccagcgaacgccgttgatttctcgctcggtgataaccggttttttacccgttaaggtcagagcaagaaaattatccattgccccctccctcgcgctggaacggataaacgctaccgagattcagtaattggctcaatacatccagtgcttcccgcccttcgcgcagcaattgcgggtcggccagatcggcagcagtaaggcgatcgcggtagtaacgatccacccagtcattgagcgcattaaacagcgtatcgttcatcatcaccgccggattcaccgcccggcgttcttcttctgtcaataccacccgcaaccgcaggcacgccgggccgccgccattcgccatgctttcacgtaaatcaaagacttttagttcgctaatcgggttgtcagcggcaaggagttcattgagataaccccatactccggcgtgttcccgacactcctgaggcagcaccaacatcatggaaccatcatcgcggctcagcagttggctgttaaacagataggtagacaccgtatcagacacggaaacctgagttgccggaacttctatcgccataaaaccattgacccgcgcacgcaggtttgccagtaactgactctggcgagcgaacgcctgttggtggcaaaacagcacctggcggttactcacggcaatcacgtcattatgaaaaacgccctggtcgataacgtccgggttttgctgggcgaaaatcacctgttggggattcacctgattcagccttgccaccgcctcgctggcttcgcgagtctgtcgcgccggataacgggaaggccgggtatcattgccttcttctcgcccgtagacaaaaagttgcatacccggttcaccgtaatgaccgccgagacgattgtggtttgccgccccctcatcaccgagcaacgctacctgtggcaacgcgctatggacgctaaatttctcttcgtcgttaaaaatcgcttttaacaggctttcagtgacgggcgcttccaggctacggtgaaatttattgttcaggttggcaacggtgagatgcactttgccatccagcgtatcggcagatggcgcgatcgttgccgcattggctacccacattgggctagcggaactgacgctggaaagccagtgcggtgcctggcgtgcaactttttccagtacctgctcatcgctaccactgaatcccaactgacgcagcaccggaataaacggacgctcgtgcggcgggatcacggcctgggggaatcccgcatcggcaagggctttcattttcagtaagccctgcttcgccgccagtcgcgggttagacacctgaaaacggtgacgggtagaggcttcattaccaaagctcaggcccgcgtaatgatgcgtcagccctaccagcccgtcgaaattgacttcccaggcgttcatcgcaccacctcatcggaaaaatccagcccggggttaagcgtggcgggcaatgttaagctgtcgctctccaggctcgccatcggccatgcgcagtaatctgcggcataccaggcgctggggcgatggttaccggaagcaccaatgccgccgaatggcgcggtactggcagcaccggtaagcggtttgttccagttaacaatccccgcccgcgcctccagcaacagttgatcgaacttttcccgctcgggggaaaccagaccgcaagagagtccgaagcgagtgttattcgccattcgaatcgcttcatcgaaagtatcataacgccagacgcgcaataacggtccgaacacctcttcatctggtacgccagcaacgcctgtcatttcaatgatccccggcgtcagcaagcttgtccctgcttgtaataagcgcggcgcaagcaggggtcgtccgcccatcgcttccagttgctgccatgcagtaaccacctgctgtgcggcctgttcagaaatcagcccgccaataaacggctgcggttcgtcatcccagttgcccggcgttaatcgctggctgacggcaaccagacgagcaagaaacgcatcgccctgcgccccgcttttcagcaataaacggcgggcgcaggtgcagcgttgaccggctgtgacaaacgcgctctgaatggtcagatggacagccgcgtcgatatccgccacctcatcgataattagcggattattaccgcccatctcaagggcgagaattttctccggctgaccggagagctggcgatgcaactggtagcctgtattggcgctaccggtaaacagcaaaccgtcgagatcctccagcgcactcagcgcctgacccgtttcacgcccgccctgcaccaggttcagcacgcctggcggcaagccagcctgctgccataaacgcattaccgcttcgccactccacggtgtcagttcgctgggtttaaagataatggtgttacctgccagcaatgccggaacgatatgtccgttcggcaaatgaccagggaaattatacggcccaaacaccgccagcacgccgtgcgggcgatgtcgcaggctcgccgcgccgtccggcatttcactacgctgctcgccggtacgaacgtgatacgccttaatacttatcgcgattttattgatcatcgccgtcacttcggttgccgcttcccagcgcggcttacccgtttctctggcaataatcgcggttaattcggctttattgctttccagcagtgcggcaaagcgttcgacaacggcatgacgttcagcaaaactaagccgcgcccagcgcggaaacgccgcacgggctgcccgacaagcctgctcgacctgagcggcatcggcatcattgccttgccataacacctcgccgcttaccggattacgcttcacacggcttgcgccctggcccgttatccagtcaccgttaatccataaagtcatgctgttttctcctctgcgcacaggcgcaccagacgaacgcgatccccggcgtggcatttgagggcatccagttgtgcggcggttaaaatcaaacgctcggttgccggatcggtacgcaccagcaccacgcggaaatggtgataattttcattggcgaccaggcaggctgggaaatcgccctgcgcaggctgcccttctgccacttccaccagccgacttttacggatggcgcgcacgcggtcgatgtcacactcaagcgtcggcccaccgtcaaagatgtcgatatagttacggtagcgaaaaccttctttctccagcaccgcgcgggcaggcgcggtttgcggatgtacctgaccgatgacgtcctgggcttcctgggataaaaagtgggtatagatcggatgtttcggcatcagttctgcaataaatgccttttgcccggtgccgcagagaaaatcggcgcggctaaaatccatgctaaagaagcgtttaccgaggctttgccagaacggactatagccgtgttcgtcaatcaccccgcgcatttcagcaaccactttgtcattaaacttgtcgcgaaaagccgccataaacataaagcggcttttgctcagcaaatagccgttgccctctttgcgccagtccgggtcgagaaacagcgtgcacagctcgctgctgccggtgtgatcgttactgagaaacagcgtcggcaatgcgttatagacattcagctctttactggcgtgaaccaacgtgccgacgcgatagttgtaccagggatcgttcagcccaaccgccacctcaatggcacaaatccccgccacggtgcctgtctcgctatcttccagcacgaacacatagccctgctcacttttgggcagttcgccttgccaggttttgattgccctttcgatacgcgcgctaagcgtggcttcattggcgggaaggctcgtcaggccgccgcccgttttgctggcaagctgcatcagcgcgctgacatcacttcgctcaacgggacggatgaccatcatgatgaacctcggctaacaaattatttcaactactacctcggctaacaaagtgttcgcaagcagctgcaaagcgatccagtccggtcgtcacctcttcttcgctgacattgagcgcaggcgcaaaacgcaccacgttgccacccgcaatcagtaccatcacgcctgctttcgccgcttcctgagagatctgtttcgcttgcccggcgtaatcggcattcagtacacagccaatcagcaaacctaagccgcgaacttcactgaacaaaccatagcggtgattaatagtattaagacgctcaacaaaccagtcgtgacgctgtttaacgccattaagcatctctggtgtgttgatgagctccagcactttgcctgccaccgcgctggccagcggattaccgccataggtggtgccatgagtgccaacggtcatcacgcgggcgcactcttcggttgccaacaacgcaccgaccgggaaaccgccgcccagcgctttggcggtagttaacagatcaggcgtcacgccgtagtgcatataggcatacagttccccggtgcgcccgacgccggtttgtacttcatcaaaaatcaacagcgcattgtggcggttacacaattcacgcagaccttgtaaaaacgcgttgctggctggcaccacaccgccttccccctggatgggttcgacaatcaccgcacaggtagagtcgtcaatcagcgcgctggcagagttaatatcgttatatgcagcatgacgaatatccgccggcagtggcgcaaaatcctgactataggctggctgcccacccgcactgacagtaaacagcgtgcgaccatgaaacgcatttttgaacgccacgatgccgctcttatggctgccgtagcggtcgtgagcgaatttacgcgccagttttagcgccgcttcgttggcttccgcaccggagttacaaaagaagacgcgatcggcaaacgtggcgtcgatcaattttttcgccagtcgcagtaccggctcgttggtgtaaccgttgccggtatgccagaacttactcgcctgttcgttcagcgcttcacgcagttccggatgcgcatggcccagcgcgttcaccgcaatgccacccgcgaagtcgatatactctttcccctgctgatcccacaagcggctaccttcgccacgtaccggtataaagggtgccggagcgtaaacaggtatcatccattcatcaaagttttcacgcgtaattggctgagacatagcgacctctacagtaaataattcgttatttatatgttaataataagtaatgtttgcgctgtaaatgtagattgcagggttcgtgccagccagtgataaaagtgcataaacggcggaggctaactggaaatcaaggagttataaccaaaccatatgcatttaaagtgcatataaagtgaatacgtttgcgatgtgggtgaataaaaagaataaaaaacgcaatgttatgcagaagtaaaatataattctggaattgtgatcattgacgaaatttactggaaattactgcgccattctgacgcagcgcgcaccaaaagcgggcatttttttgcgccatcgttgacatcattaacaaccatcgatcaaatcacttaacaacaggcggtaagcaacgcgaaattctgctaccatccacgcactctttatctgaataaatggcagcgactatgaaatttgtctcttttaatatcaacggcctgcgcgccagacctcaccagcttgaagccatcgtcgaaaagcaccaaccggatgtgattggcctgcaggagacaaaagttcatgacgatatgtttccgctcgaagaggtggcgaagctcggctacaacgtgttttatcacgggcagaaaggccattatggcgtggcgctgctgaccaaagagacgccgattgccgtgcgtcgcggctttcccggtgacgacgaagaggcgcagcggcggattattatggcggaaatccccagtctgctgggtaatgtcaccgtgatcaacggttacttcccgcagggtgaaagccgcgaccatccgataaaattcccggcaaaagcgcagttttatcagaatctgcaaaactacctggaaaccgaactcaaacgtgataatccggtactgattatgggcgatatgaatatcagccctacagatctggatatcggcattggcgaagaaaaccgtaagcgctggctgcgtaccggtaaatgctctttcctgccggaagagcgcgaatggatggacaggctgatgagctgggggttggtcgataccttccgccatgcgaatccgcaaacagcagatcgtttcagttggtttgattaccgcagtaaaggttttgacgataaccgtggtctgcgcatcgacctgctgctcgccagccaaccgctggcagaatgttgcgtagaaaccggcatcgactatgaaatccgcagcatggaaaaaccgtccgatcacgcccccgtctgggcgaccttccgccgctaatttagcagctctcctggctcaaactgggtcaggagaattaaccttgagaaaaatcaacaaactgtcagtaatgatttgttgcctgccgtcctttgttataccgtctctgcgtttttagttgtctgaccacttctctattatcaagtttgatataggaaactccacgatgaacgctgagcgtaaatttctttttgcctgtcttatttttgcgctggtcatttacgctatccacgctttcggtttattcgatctgctcaccgatttaccccacttacagacactcatccgccagagcggatttttcggctatagcctctatattctgttattcatcattgccaccctcttgctgttaccaggaagcatactggtgatcgcgggaggaatagtttttggcccgctcttagggacactactcagtttaattgccgccacgctggcctccagctgcagtttcctgctggcgcgctggctgggacgtgatttactgctgaaatacgttggccatagcaataccttccaggccattgaaaaaggcattgcgcgtaacggtattgattttcttattctgacccgcttaatcccgttgtttccttacaatattcaaaattacgcttacggattaaccacaatcgccttctggccttatacccttattagcgcactcacgaccctacccggtattgttatttataccgtgatggcaagcgatctcgccaatgaaggcattacgctgcgctttattttacaactctgtctggcgggcctggcgctgtttattctcgtccagctcgcaaaactctacgcccgacacaaacatgtggatctgtctgctagccgccgcagcccacttactcacccaaaaaatgaaggataaaacgatgttgcaacattatagtgtgagttggaaaaaaggactggctgcactctgtttactggctgttgctgggcttagcggctgcgatcaacaagagaatgcggcggcaaaagtggaatacgacggacttagcaacagccaaccgctgcgtgtcgatgccaataaccatacggtaaccatgctggtgcaaattaatggtcgtttcctcaccgacgacactcgtcacggtattgtgtttaaagatggctccaacggacataaaagcctgtttatgggttatgcgaccccgaaagcattttatgaagccctgaaagaggcaggtggtacgccgggcgaaaacatgacgatggataataaagaaacgactcatgtcacaggcagcaaactggatattagcgtcaactggcaaggggcggcaaaagcgtattccttcgatgaagtgattgttgacagtaatggcaagaaactggacatgcgctttggcggtaatttaacggcagcagaagagaagaaaacgggttgcctggtgtgtctggatagctgcccggtcggcatcgtcagcaatgcaacatacacttatggtgcggttgaaaaacgtggtgaagttaaattcaaaggcaatgccagtgttctcccggcggataacacgctggcaacggttacctttaaaatcgccgaataaagccaggataaaggatgatgatgatgcaaagccgaaaaatctggtactaccgtataaccctcatcatcctgttgttcgctatgctgctggcatgggcgctgcttcccggcgtccatgagtttatcaatcgcagcgttgcggcgtttgccgccgtggaccaacagggtatagaacgctttattcagtcttacggcgcactggcggcagttgtcagcttcttgttgatgattttgcaggccattgctgcaccgctacctgcgtttttgatcacctttgccaatgcgagcctgtttggcgcgttctggggcggcttgctgagctggaccagtagcatggccggcgcggcgctgtgcttttttatcgccagagtgatgggccgcgaagtggtggaaaaattaaccggcaaaaccgtgcttgacagtatggacggctttttcactcgctacggcaaacacaccattctggtctgtcggttattgccttttgtccctttcgatccaatcagctatgctgccggtttgactagtatacgttttcgcagcttttttatcgccaccgggcttggtcagttaccggcaactattgtttattcctgggcgggcagcatgttaacaggcggtactttctggtttgtcaccggactgtttattctgtttgccctgaccgtggtgatttttatggcgaagaaaatatggcttgaacgccagaagaggaatgcctgatgggtttaccgccgcttagcaaaattcctttaattttacgtccacaggcgtggctgcatcgtcgccattacggcgaggtgctaagccccattcgctggtgggggcggatcccgtttatcttttatctggtgagcatgtttgttggctggctggagcgtaaacgcagtccgctcgatccggtagtacgaagccttgtcagcgcgcgcattgcgcaaatgtgcctgtgtgagttttgtgtggatatcaccagtatgaaagtcgccgagcgcaccggcagcagcgataaactgctggcagtggctgactggcggcaaagcccgctctttagcgatgaagaacggctggcgctggagtacgccgaagccgcaagcgtaacgccgccaacggtcgatgatgccctgcgtacccgactggctgcgcattttgacgctcaggcgctcaccgaactgacggcattgatcggcctgcaaaatctgagtgcccgttttaattctgccatggacattcccgctcaggggctgtgccgtattcctgaaaaacgttcttaaggagagatgatgcgccattgtgggtggttgctgggattgttaagcctgttttctctggcaacacatgccagtgactggcaagaaattaaaaatgaggccaaagggcaaaccgtctggtttaacgcctggggcggcgataccgcaattaaccgctatctcgactgggtgagcggcgagatgaaaacccattacgctataaacctgaagattgtccgtctggcggatgccgcagacgcggtgaagcgcattcagaccgaagccgcagccggacgtaaaacgggcggcagcgtggatctgctctgggtgaacggcgaaaacttccgcaccttaaaagaggccaatttattacaaacgggctgggcggagactctgcccaactggcgctatgtcgacacacagctgccggtgcgggaagatttttctgtgccgacacaaggtgcggaaagcccctggggcggcgcacaactgacgtttatcgcccgccgcgatgttacgccacagccaccacaaacgccgcaagccttactggagtttgctaaagccaatcccggcacggttacctatccgcgcccaccggactttaccggcacggcgtttcttgaacagttgctgattatgctgacgcccgatcccgccgcattaaaagaagcgccggacgatgcgactttcgcccgtgtcactgctcccttgtggcaatatcttgatgtgctgcatccgtatttgtggcgcgaaggaaaggatttcccgcctagtcccgcgcggatggatgctctgctgaaagccggcacattgcgcctgagcctgacctttaaccccgcgcatgcgcagcaaaaaatcgccagcggcgatttgcctgcaagcagttacagttttggctttcgcgaggggatgattggcaacgtgcatttcgtcaccattcctgccaacgcgaatgccagtgctgcggcgaaggtagttgccaatttcctgctcagtcccgatgcgcaactgcgtaaagcagatcccgctgtctggggcgatccttctgttctcgatccgcaaaaactgcctgacgggcagcgcgaaagtttgcaaagtagaatgccgcaggatctgccgccggtactggctgaaccgcacgcaggttgggtaaatgcgctggaacaagaatggctacaccgttacggtacgcattaatctttttgctgtgggcgatggtggcggtgatttatgcaccgctgatcccggcagctctcacgctgataagccctgctttgagcttgacacactggcaggcgttatttgccgatccacagttaccgcaggcattactggcaacgctggtgagcacaaccatcgcggcggtcggggcattgttgattgccctgctggtgattgtggcgctgtggcctgggccgaaatggcagcgtatgtgcgcccgtctgccgtggctgctcgccattccccatgtggcttttgccaccagcgcccttctgctctttgctgacggagggctgctttatgactatttcccgtatttcactccgccaatggaccgatttggcatcggtctgggcctcacccttgcagtgaaagaaagcgcatttctgctgtggatcttagcagcagtattgagcgaaaaatggctgttgcagcaggtcattgtgctggatagcctgggctacagccgctggcaatgcctgaactggctgctgttgccctccgtcgcgcctgcgctggcaatggcgatgctggcgattgttgcctggagcctgagcgtcgtggatgtggcaattattctcgggccaggtaatcccccgacgctggcggtaattagctggcagtggttaacccagggcgacattgaccaacaaacaaaaggcgcgcttgccagcctgctgttgatgctgttactcgccgcctacgttttgctgagctatctgctatggcgcagctggcggcgcactattccccgcgtagatggcgttcgcaagcctgccacgcctttattgccgggcaatacgctggcgatttttttacccttaaccggtgtgctgtgtgtggttctgctggcgatcctcgcggatcagagcacgatcaatagtgaagcgctcatcaacagcctgacaatggggctggtggcgacattcatcgctttgctcctgttactgctgtggctggaatgggggccacagcgtcgccagttgtggctatggttgcccattttattacctgctctgccactggtggcgggccagtacacgctggcgctatggctgaaactggatggaagctggacggcggtggtctgggggcatctgctgtgggtgatgccgtggatgctgtttatcctgcaacccgcctggcagcgcattgatagtcggttaattttgattgcgcaaacactgggctggagccgggccaaaatcttcttttacgtgaaatgcccactcatgttgcgccctgtgctgattgccttcgcggtgggatttgcagtcggtattgcgcagtatatgccaacgctgtggctgggcgcggggcgttttccgacgctcaccactgaggcggtggcattaagcagcggcggcagcaacggtattctcgccgcccaggctttatggcaactgctattaccgcttattatttttgccctgaccgcgttagtcgcaaaatgggtaggttatgtcagacaaggactccgctaatgctctgcgtgaaaaatgttagcctacgtttaccagaaagccgcttgctgacaaacgttaactttacggtggataaaggtgacattgtcacgttaatggggccgtctggctgtggaaaatccactctgtttagttggatgattggtgcactggccgaacagttttcttgtacaggtgagctatggctcaatgagcaacggattgacatcctacccaccgcacagcgtcagattggcattctttttcaggatgcactgttatttgaccagttcagtgtcgggcaaaatttactgctggcgctaccggcgacacttaaagggaatgcccgacgtaatgccgtgaatgatgcacttgagcgtagtggccttgagggagctttccatcaggatcctgccactttgtctggcggtcagcgagcgcgcgttgctctactacgcgcccttctcgcccaaccaaaagcgttactcctggatgagccattcagccgtcttgatgtggctctgcgcgataattttcgccagtgggtgttcagcgaagttcgcgccctggcgatccccgtcgttcaggtaacgcacgatctccaggatgttcctgctgatagttctgttctggatatggcgcagtggagtgaaaattacaacaaactgcgataacgcaaagtttttctcaatgcgtcagttcagaatggcgcactcaaaactacaatgtcgggattttcgatgaaacgtgtttctcaaatgaccgcgctggcaatggctttagggctggcttgcgcttctagctgggccgctgaactggcgaagcctcttacacttgaccagcttcaacaacaaaatggcaaagcgatagatactcgccccagcgcgttttataacggctggccacaaaccttaaatggcccttctggtcatgaacttgccgccttaaacctctctgccagctggcttgacaaaatgagcaccgaacagctcaacgcgtggatcaagcaacataacctgaaaaccgatgctccggtggcgctgtacggtaatgacaaagatgtcgacgccgtcaaaacgcgactgcaaaaagcaggtttaacgcatatctccatcctgagtgacgcgctaagcgaaccttcccgtctgcaaaaactgccgcattttgagcagctggtttatccgcaatggctgcacgacctgcaacaaggtaaagaggttacggcgaaacctgccggtgactggaaagtcattgaagcggcctggggcgctcctaagctttaccttatcagccatattcccggcgctgactacatcgataccaacgaagtggaaagtgaaccgctgtggaacaaagtttctgatgaacaactaaaagcgatgctggcaaaacacggcattcgccatgacaccacggtcattctgtatgggcgtgacgtatacgctgcagcgcgtgtggcgcagattatgctttatgctggtgtgaaagatgtgcgcctgctggatggcggctggcaaacctggtccgacgcgggactgcctgttgagcgcggaacgccaccgaaagtgaaagcggaaccggatttcggcgtgaagatcccggcacaaccgcagttgatgctcgatatggaacaggcccgtggactgctgcatcgccaggatgcaagcctggtgagcattcgtagctggccagaatttatcggtacgaccagcggttacagctatattaaaccaaaaggtgaaatagccggcgcacgttggggacacgctggtagcgacagcacgcatatggaagattttcataacccggatggcaccatgcgcagcgccgatgatattaccgctatgtggaaagcgtggaatatcaaaccagagcagcaagttagtttctactgcggcaccggctggcgcgcgtccgaaacctttatgtacgcacgcgccatgggttggaagaatgtttccgtgtatgacggcggctggtacgaatggagcagcgatccaaaaaatccggtagcaaccggtgaacgcggcccggacagtagcaaataacattgcaattactgacgctggaggctcttcagcgtcagatacccactccacacccgcgtaaaggtcgtcatccagcacaacgcaccgaagatccacgcaaaccacgcaaaccatgcagggaataaacatcccagcacaaacagtaagatcgtttctgtgccttcggttaatccccccagatagtaaaagctcttatgtgcataaccggggttatcaatctgatgttttgctgccagtgcagcaaaggcgagaaaactgctgcccgtgccgataaacgcaaacaacaaccagccgcctgccagcgcattttgctccggtgcagcaagaataaagccaaacggcaccagcgcgtaaaagagaaaatcgagagaaatatcaagaaagccgcccgcgtcggtaagctctctgcgccgcgccagcgcaccgtccagaccatcaagcagcctgttcaacaaaatgacgactagcgccgccagataccagcccagcgccagaaacggcagagccagcacgccgatggcaaatcccactaatgttaaaccatctggcgtaatgcccggtttatcaagaacccgcacgcactgatgcaacaacggtttaatccggggatgaagatggcggtctagcacaggcactccttaaatataaagcctttctgattgagcaacagtgcggatattatggcatttttcgcttatctgcccgtgtgtaatttatgaaaatgattgaagttgttgccgccatcattgaacgtgatggcaaaattttactcgcgcaacgccccgcccagagcgatcaggcgggattatgggagtttgccggtggtaaagtcgagccggatgaaagtcagcggcaggcgctggtgcgtgagttacgcgaagaactgggcatcgaagcaactgtgggtgaatatgttgccagccatcagcgagaagttagcgggcggattatccatcttcatgcctggcacgtacccgacttccacgggacgttacaggcacatgaacatcaggcgctggtctggtgcagtcctgaagaggcgctgcaatatccgctggcccctgctgacattccattattagaggcgtttatggctttacgcgccgccagaccagcggattaattatggctttacgcgccgccagaccagcggattagtgctaagggttttgtcatcacgctggcattgcagcagtattccttcggctttaattaccgccccttcagaataattttgatcctgataaacgcagcactgagtacagggctgcgcactctgcccgccactactgaacacttctggcggtacgtttacctccacgtccggacgataatgcgggttagccagtgcaattaatggaaatgctaatactacggcgaacaatgctcgactcacagggaactccttaacgttattgtctctgctactgataacggtagccgggtggcaaaactttagcgtctgagttatcgcatttggttatgagattactctcgttattaatttgctttcctgggtcatttttttcttgcttaccgtcacattcttgatggtatagtcgaaaactgcaaaagcacatgacataaacaacataagcacaatcgtattaatatataagggttttatatctatggatcagacatattctctggagagtttcctcaaccatgtccaaaagcgcgacccgaatcaaaccgagttcgcgcaagccgttcgtgaagtaatgaccacactctggccttttcttgaacaaaatccaaaatatcgccagatgagtttactggagcgtctggttgaaccggagcgcgtgatccagtttcgcgtggtatgggttgatgatcgcaaccagatacaggtcaaccgtgcatggcgtgtgcagttcagctctgccatcggcccgtacaaaggcggtatgcgcttccatccgagtgttaacctttccattctcaaattcctcggctttgaacaaaccttcaaaaatgccctgactactctgccgatgggcggtggtaaaggcggcagcgatttcgatccgaaaggaaaaagcgaaggtgaagtgatgcgtttttgccaggcgctgatgactgaactgtatcgccacctgggcgcggataccgacgttccggcaggtgatatcggggttggtggtcgtgaagtcggctttatggcggggatgatgaaaaagctctccaacaataccgcctgcgtcttcaccggtaagggccttagttttggcggcagtcttattcgcccggaagctaccggctacggtctggtttatttcacagaagcaatgctaaaacgccacggtatgggttttgaagggatgcgcgtttccgtttctggctccggcaacgtcgcccagtacgctatcgaaaaagcgatggaatttggtgctcgtgtgatcactgcgagtgactccagcggcactgtagttgatgaaagcggattcacgaaagagaaactggcacgtcttatcgaaatcaaagccagccgcgatggtcgagtggcagattacgccaaagaatttggtctggtctatctcgaaggccaacagccgtggtctctaccggttgatatcgccctgccttgcgccacccagaatgaactggatgttgacgccgcgcatcagcttatcgctaatggcgttaaagccgtcgccgaaggggcaaatatgccgaccaccatcgaagcgactgaactgttccagcaggcaggcgtactatttgcaccgggtaaagcggctaatgctggtggcgtcgctacaagcggcctggaaatggcacaaaacgctgcgcgcctgggctggaaagccgagaaagttgacgcacgtttgcatcacatcatgctggatatccaccatgcctgtgttgagcatggtggtgaaggtgagcaaaccaactacgtgcagggcgcgaacattgccggttttgtgaaggttgccgatgcgatgctggcgcagggtgtgatttaagttgtaaatgcctgatggcgctacgcttatcaggcctacaaatgggcacaattcattgcagttacgctctaatgtaggccgggcaagcgcagcgcccccggcaaaatttcaggcgtttaactgtatttaacggaacttgctccccacggaacatttcttatgggccaacggcatttcttactgtagtgctcccaaaactgcttgtcgtaacgataacacgcttcaagttcagcatccgttaactttctgcgatagcagcagatatgccagtaaagaaatcccatttgactatttttttgataatcttcttcgctttcgaacaactcgtgcgcctttcgagaagcaagcattatataatgccaggccagttcttcttcaattgtcccgttttgaaaagctgtgctacttatgctgatcatccaacttaattccgccgcccatattagcttcgcgctggatttaccggagctatgattagcgcaatcagagatatagtcactgggaaaaacagcaaatttattcaacaaggcgataacctgctctggggcttcctccatgtttgctttaaaggtattggctccatggtcgccagaaagaaaatgctccattaaggcacaataactttcgctatcttcgataccccattgatcctctaaagactcgcgtcttttacttatgatatcgatgctgtcaaaaggaagcacatgatattggaaggtatctttgccaggttcaggctttcgcggccagaactccagcgtttcagaccattgcttatgatagaatcgataaggtgcgatcaattgtagcgcctgtaacttctcgatactgagcggctcaatacctttagcctgataataatgcagttgttctttttttgctttaaaaccggcccgaacaataagccccatcataattaatagataaagaaaagagcatcccgcggtaatcaggcctctttcattcaaaccgttggatgttatcgctgcgaacacaaacattacagcgacaacacatgttaaataaaacccccacttacaaagcagcatggccttattttctttaatcatccgttcaaaattactattaaatatttcccagccattaaaagaatacttctcgctcccaggatggttttgtaataaaacttttttcatcacattccctgttattacatactttagaggcgataattttatccatgcaaaaaaaatatccaacgaattttcttgatccgctggatatttcagaatatgactcgaatagcacgaaagattcactcgcttacgctatcgccccgcttccgacttcatctgctggcggactttttttcgcactacgtttacgcggtgcagcctttttcttatcagcactgccaccactgcccggagccacaatgccgcgaaactgccgcaccggcgtacgtttggcttgatcaataagctgatatagcgtccccaccagcggctgcataaagtcctgatagcgacactgcttttcgctgatttgcgtcagcacgctttcccagtgcgcggtcatgtccggtcgcgtcgccatctccggcaggctatggaatagcgcttttccggcgtcggtggagtggatatagcgcccttttttggtcaggaaaccacgcttgaacaacagttcaataatcccggcacgcgttgcctctgtccccagaccatcggtcgcacggaggatctttttcagatctttatcctgcacaaagcgcgcgatcccggtcatcgcgctaagcagtgttgcatcggtaaaatggcgcggcggctgggtttgccgctctaccacttcacctttttcacacagcaactcatcgcctttcgccaccacaggcagtggcgtgccgtcgttttcttcatcgcgctctttgctgcctaacagcgtgcgccagcctgcttcagcaagaaaacgcgctttagcgacaaatttgcctttggcaatgtccagttcgataacacacttgcggaacaccgcatccgggcagaattgcatcagatactgacgggcaatcaggttatagaccttcgcttcgttctccgtcaggttgatcgcagaactccgtgcggtcggaatgatggcgtggtgcgcatcgacctttttgtcatcccaacagcggttgcgtatatctggatctaccactggctgcggcaacagatccggtgcatgaacactgatggcattcatcaccgcgtggcgtccggcaaaatgttcttctggcaaatagcgacaatcagaacgcggataagtgattagcttgtgcgtttcgtacagtttctggcagatatcaagcacgttctgcgcactcagaccaaaacgttttgccgcttcaatctgcaacgcactaaggctaaaaggcagcggcgcggattcactttcccgtttatcgttatagctggtgacaatagccggttgaccactaatgcggttaaccacatgctccgccagtggacgatgtaacaagcgcccttcttcatcctggtacggttcacacgcttcgctcggttgccagatagcggtaaaccgctcatcggcaggtgtcacgatatgtgctttgacttcaaagaagtctttcgccacgaagttttcaatctcttcatcgcggcgcaccaccagcccaagcacgggcgtctgcacgcgtcccacggaaagtacgccctgataaccggcattgcgaccgagaatggtatacgcacgggtcatattgatgccgtacagccagtcggcacgcgctcgcgccagcgcagaaacgcacagcggtacaaactcactgttggaacgaagacggtcgatcgcccgctcaaccgcctgcgggttcaggtcgtttatcaagcaacgctgtacctgctggcgcttttccggtgccagttgcagatagtccagcacttcatccaccagcaattgcccttcacgatccgggtccccggcgtgaacgatttcgctggcttcatgcaggaaccgtttgatgacgttaagttgtttggtcacggagggtcggggctgtaattgccacttttccgggacaatcggcaaatccgcaagattccagcgcgcatagcggctgtcgtaggcgtctggctgcgcctgctcaagcaggtgaccgatacaccaggtcaccacctgaccattaccgcactcgataaagccatcgcctttccggtgcggtttgggcaggacatcagcaatggcgcgcgccagactcggtttttcggcaataaacaaccgcattgaattaacgaatctcaaccatggcacgaccgccgcgcgctggcaccagttcgccaattgccgtcagttcaatgccaaactcggcggctgtagctttgacctcattttctgcttccggcatgaccgccagcagcaaaccgccagaagtttgcggatcacacagcagatcgcgcacttcacgcggcatttcacccatcagatgaccgtagctggcaaagttacgttcagtgccgccaggtactgcgcccaacttaatgtactcttcaacaccggggagtttcgggatcgcttcatagtcgacgcgtgcctgcacaccagccccctgacacatttcgctcaagtggcccagcagaccaaagcccgtaacgtcggtcatcgcttttacgccttcgatgttggcaaaggacgcgcctgcgatgttcatccggcacatcacttccgtcgccagtccctgatgttctggtttcaacagactttttttctcagccgtggtaagaacgccgatccccagcggtttcgtcaggaacagtttgcatccggcttgtgcggtactgtttttcttcacccgctcggtcggtacgatccccgttaccgccagaccaaaaatcggctccggcgcatcgatggagtgaccgccagccagcgcaatacccgcctgacgacatgcatagcgtccaccttcggtcacttcgcgggcaatttctggggaaagtttgttaatcggccagccgaggatcgcaatcgccataatcggtttgccccccatcgcgaagatatcgctgatggcgttagtcgccgcaatgcggccaaaatcgaaaggattatcaacgatcggcataaagaagtcggtggtactgataacgctggtgccattgcccagatcgtacaccgccgcatcgtcgcgggtttcattacccacaagcaaattcggatcaacaaacttcgcctgctcactatgcaggatggtttccaacacttttggggaaattttacagccgcaaccagctccgtggctgtattgggtcaaacgaatgctgttctcgctcatggacatctcctgtcaatgcaatccgggtatggtaaccctcattccgtgaagtgataagtgagagtgtctgaattcctgcgcctttgctcacaatccagacagtttcgcgacaattatcagaaataagttacaaacggcgtcgggtccgggacgttaatgctcgtagatgctttcagctgcggcgtaccgaggtagagaaaaccgacaattttatcctgctcacggcaaccgaatgcttcacgcactaccggactttcagttaatgcgccactgcgccagatgccgccaaacccctgggcaactgctgccatttgcatcgccatgaccgcgcatccggcagacatttcctgttcccagcgcgggactttatgattctcttcgcatttcgccaccaccgtgatgatgagcggtgcgcggaacggcgcattacgggctttgtcgatagctttgtcatcactaccggcagcaatcgccccctgttccagtacggcgctgaaacgctcgcgcccttccccttcaatcacaaaaaaatgccacggttgcatggacttatggtccggcgcacgcatacccgcacgcaggatgttttgcagttgttcacccgttggcgcgggttcagccaagcgggaggcgctacggcgattgatcaatagttcgagtgcatccatttgattaactcctgtcgtgatatttattcacaaaattaacacgagagtggattttgttacagcacagtccgcaattcctgctgacaagtaccggttgggtcattacgataaccacatctattgcgcctgtgacaggtgtgaccttaagttgggagaatacatgcgaaccctttggcgatttattgccggattttttaaatggacgtggcgtctgctgaatttcgtccgtgaaatggtacttaacctgttctttattttcctcgtactggttggtgtggggatttggatgcaggtcagtggtggtgatagcaaagaaacggccagtcgtggcgcactgctgctggacatttctggtgtgatcgtcgataaacccgacagttctcagcggtttagtaaattaagccgccagctgcttggtgccagttccgatcgtctgcaggaaaacagtctgtttgatatcgtcaacactattcgccaggcgaaggacgaccgcaatatcaccggtattgtgatggatctgaaaaacttcgcaggcggcgaccaaccgtctatgcagtacatcggcaaagctctgaaagagtttcgtgacagcgggaaaccggtttatgccgttggcgagaactacagccaggggcaatattatctcgccagtttcgccaataaaatttggctgtctccgcaaggcgtggttgatctgcacggctttgccaccaacggtctgtactacaaaagcttgctggataagctgaaagtttccacccatgtgttccgcgtgggtacgtataaatctgccgttgaaccgtttattcgtgatgatatgagtccggcagcccgcgaagctgacagccgctggattggtgagctgtggcaaaactatctgaatactgttgccgctaaccggcagatccctgctgagcaggtattccctggcgcgcaagggttgcttgagggtttaaccaaaaccggtggcgataccgcgaaatatgcactggaaaacaagctggtcgatgcactggcaagcagtgcggaaatcgaaaaagcactgaccaaagaattcggctggagtaagactgataaaaattatcgcgccatcagttattacgattacgcattgaaaacgccggcagataccggtgacagcatcggtgtcgtctttgctaatggcgcaattatggatggcgaggaaactcaggggaatgttggcggtgataccactgcggcacaaatccgcgacgctcgccttgacccgaaagtgaaagcgattgtcctgcgtgttaatagcccaggcggcagcgttaccgcgtctgaagtgattcgcgctgaactggcagcagcccgggcagcgggtaagcctgtggttgtaagcatgggcggcatggcggcatctggtggttactggatttccacgccagctaattacattgtggctaaccccagcaccctgaccggttctatcggtatcttcggcgtgatcaccaccgtagaaaatagtctggatagcattggtgttcatactgatggtgtcagtactagtccgctggcggatgtttctatcaccagggcactgccgccggaagcgcagctgatgatgcagttaagcattgagaatggctataaacgctttatcacgctggttgctgatgcgcgtcatagcacgccggagcagattgataaaattgcccagggccacgtctggaccggtcaggatgcaaaagctaacgggctggtcgatagtctcggggatttcgatgatgcggtcgccaaagcagcagagctggcaaaagtgaaacagtggcatctggaatattacgttgatgaaccgaccttcttcgacaaagtgatggacaacatgtctggttctgtccgggcaatgttgccagatgcgttccaggccatgttacctgcaccgctggccagcgtagcctctaccgttaaaagtgaaagtgacaagctggccgcgtttaatgacccacaaaaccgttatgcgttttgcctgacctgcgccaacatgcgttaagtcttgtactgagtggccgacagatcgtcggccacattattttttacgtcgacgaatcctcttcccgctgtttcgccccatatttccttatccgcatagtatcaggtgcgctccccctgcctcacgtatatacttttgctctttcgatatcattcatatcaatatcatgcaaaagaaaagtatttacgttgcctacacgggcgggaccatcgggatgcagcgttccgagcagggttatataccggtgagtggtcatctacaacgccaactggcgctgatgccggaattccatcgcccggagatgccagatttcaccattcatgaatatacgccgctgatggattctagtgatatgacgccggaagactggcagcatattgctgaagatattaaagcgcactatgacgactatgatggttttgtcattctgcacggcaccgacacgatggcgtataccgcctctgcgctgagcttcatgctcgagaatctcggtaaaccggtcattgtgacagggagtcaaatcccgctggctgagttacgctctgacggacaaattaatctgctgaatgcgttgtacgttgcggcgaattatccgatcaacgaagtaacgctctttttcaataaccgattgtatcgcggcaaccgcactaccaaagcccatgccgatggttttgatgcgtttgcctctccaaaccttcctccgttactggaagcaggtatccatattcgtcgtttgaatacgccacccgccccgcacggtgaaggggaattaatcgttcatccaatcaccccacaaccaattggcgtagtgacgatttatccagggatttctgctgacgtcgtgcgcaattttctgcgccaaccggtgaaagcattgattctgcgctcctatggcgtgggtaatgcgccacaaaacaaagccttcctgcaggaattacaagaagccagcgatcgcggtattgtggtggtcaacctgacacaatgtatgtccggtaaagtgaacatgggtggttatgccaccggtaacgccctcgcccatgccggcgtaattggcggtgcagatatgactgtagaagccacgctaaccaaactgcattacctgcttagccaggaactggatactgaaaccattcgcaaggccatgagccaaaacctgcgcggcgaactgacgccggatgattaaggagactgtaatgccccctcgcgccctgttactggtcgatttacaaaatgatttctgtgctggtggcgcgctcgccgtgccggaaggtgacagtacggtggatgtcgctaaccgcctgattgactggtgccagagccgcggtgaagcggttatcgccagtcaggactggcacccggcgaatcacggcagttttgccagtcagcacggtgtagagccttatacgccaggccaactcgacggtttgccacaaaccttctggccagatcactgtgtgcagaacagtgaaggcgcacaattacatccgttactgcaccaaaaagcgatcgcagcggtgttccataaaggcgaaaatcctttagttgacagttacagtgccttttttgataacggccgtcggcagaaaacctctctcgatgactggttacgcgatcatgaaatcgatgaattgatcgttatgggcctggctactgactattgcgtgaagtttaccgtgctggacgcgttacagttaggttataaggtaaacgtgattaccgatggttgtcgtggcgtgaatatccagccccaggacagtgcgcacgcgtttatggagatgagtgcagctggggcaacgctatatacgctggcagactgggaagagacacaggggtaattttacgctggcctacaattctgtactggcattgtaggccaaataaaacacgtcagtggcacatctggcaattgatgccatcaacgaaagatttaattcacctcagaaatctcttccaagctcaccttccgcgtttcgatgccaaaaatggagagaaccagcgcacagagcaataacataacaccaagtaccataaacaccgtgatgctcccataatgtgttaataatgccgcaacgccatagggcgtgaagactgcgacgatccgtccgacggcattaacgaaaccgctaccgcgcaggcgtaaatgcgttggccaaagctccgggatataaaccgcgctcgcgaagcaaacatacatgtataaaaagaagatcatcaccagtccatagattaaaatcgcccactctgtagtctgaatactatagatatagcctaacacggcaataataataagtaaggtggagccaaataaccgacgaggaaaatgatcaataattaatgccgcaataaatattcctaccggagcgccaatcataataacagcggtcattaatatacttttatcgacatcaatgccggagttaacaaatatggtcggtatccatacggtgatggtataaaggctaatgttcattgcaattaaaacagtaatcgcgactaatgtacgtcgtaacatttcacctttaaacaggagccagaaagtacccttgattactttaaccttgctgttgctctgatagctagtaagcgggggtaaacgaatactcttctctctttcaatttgctgctctacttcacgaagttggcattctgcacctgcgatttgccctttccctgccagccatcgtgggctctcgataaagtatttaccactgagaaaccaggctaacagtatgccaataccacccagcagaaacattattcgccaactaaaaaaagcgataaccaccacgcctatcgccgcagacagcatggggctccagttaccaacaaaactgagccgcgcggaccattttccacgcaccgtcgcggggataaactccgtaaaactggcatagccaaccataatcagcgcccccattcctgttcccatcaggaagcgaaagaagatgagccagtacatatcagggacaaaagcggcccctgttgcagcaataccgacgatgagaagatttatgcgaaacgccctgcgccgcccaaagtagtcaccaataaacccaccagtaagactgccgatgaaataaccaaacattaatgcgctggtaaaggcggcattgaggaaattattactccatccattgcttaccagctttgctaagacgacattaccggagtaactcaaaaaccctgttaataacagactaaagcttataataccaaatatacgataatgaaaccgggccaaaggcaagcggtccagtcttgcgccaatttgatcatattgttccattaggtgcctcggatttgctaaaaaggtagcaattgcggcaaattcacttgccgcatctttatcatcattttatttcaaggcgcaggaacaaataatattgacaacgtgtgcttaaattaccacaccagctggatattattgtctttgcaaaatgctatccactctgcacccggacttttatcagttattatgtaattaatatgactaaaatcagctaactggacaaaagctttgcgatcaaacttagagtgatcaaccaataacgcaacttctgtcgcctgacggatcattgtctttttgatttcagcttccgcttcattagagtccagcgcgccgctgttaatatcaagacctttacaactcattaccatgatatcgacatgatagcgcctgatgatctctttagtaattcttccttgcagactaagtgtatttttgtttagttccccacccgtactaacgactttaatttcactctgagccagaacatgaatcgcttccgcgctgttggttagcaacgtcaggccactacggtcctgtaacaatttgagcaattccattacggtactactggaatcggctgccatggtggttttattgtcgataaagggtagtgccttgcgtgcaataagctgcttctcttcataaaagctactagcgcgcttataaaaatggatattctccgtcaacatcgctgtatttaaaacagcaccaccataggttctggtcaaaaagccttcatcttccagcttctcaagatcgcggcgaatggtttcttcggttacctgaaaaatcccactcaaattactgactgtcacctttttatcgttggcaaccatttgcttaattgcctgaatcctgtcttttgccgccacgattacacccctgtatctttttacatcacattagcgcgattatcgcataaccgatgtttactttcaaaataacctgtttgaatcacagattttcatcacagttttcacagaaacagaggtgaatcgtgttgagtatttaacgctccagggcctctgccatttccctcatcaatgttgcgtctgcatcgcttaagttgatattcagtgccgcgacattttcgcgtacctgttccggtgcagtagccccactaagaatggagattaaatcactctgttttaatatccacgccagtgccagagtgggaattgtgcactgataacgagcacaaagtggctgccactgttcaagcatatcaatcactttcagcatgttttcacgctggaaccagactttatttgcccgagcgccgcccggaacgtaatcacgagtgatggtgccggtcaacaatccctgctctagcggggaataaacctgaaccacaatgccattatcacgacatagtggcagcagttcgttttccattgcccggtcgaggatactgtatttcgcctgaataatatccagttcaccatattgcagatactcgcggatatggtcagcatcgacgttagcagcgcctatagcgcgaattttcccttcagactttaactcattaagcactgcgacagtttcagcgatcggcgtaaaaaatggcggcacgctctgccagtgcgtcatgtagatatcgatgtaatcaatacccagacgttgcaagctcgctgctacctcttcgcggatagattccggggaaaggtttttatacaactgccgatcgccaactttgttgaataaacttccttttcgttcccagacaatgccgcatttggtttctactacaacctgttcacggggcagtttttttaacgcctgaccgacgataacttcactattgccaaagttatatcctggcgcagtatcaatcagattaatgccacaacgatgggcttcaagaatcgtatcaatacatatttgccgatcgagatcgccattccatgcaggaccgccgccaatggcccatgtccccaaccccattcggctaagcgtaatatccgttgtgcctaaaggtatctttttcatttgccttcattatccttcgtattcttccagcaattgttcgaccagctttctgttttttacgccggtggtggcaccgacgcttagaacgctgatagccgccgttgcattggcaaagcgtgcgcattcacgcagatttttgccttctaacagtgccgcaataaaaccactagcaaagttatcgcccgcgccaatggtgtcgatggcggttattcctgcgaccgccggcaccttcatcgtcatgtcaccacgcttgataaagcagccgtctttacccgttttaatcaccaccgtttttacgccgcacgcaagaaagcagtcagcaatttcatccagtgtctctttcccggtgagtaattttgcctcggcaaaattaggaaacagataatcgacataactcaatgcttcgcaaatatcatccagcgtttcattcaaccgcggtttgatcatatcggcacagataatcatctgccgggctttagcttgcgtaaaaatttctgttagcgctttaccatccaatagtggactgttgaaaatactggccagacttaataatttcgcctgagaaaaccgcgcaaaatcaacatcgtcaatattcaatttccacagactgccattacggtttgtgacaaacgtccgctcgccatcctccgtcaccagtccaacgttaatagaggtatctatgctgacgtcctgcttcaggctttgaatatcaatattctctttgcggcaatggtcgagaataaattgccctgcggcatctttaccaatacgactcattaatgctgtgcgatggcccagacgagaaataattgttgcttcatttattgcatcacccccggtggtcattgcgattctttcaagaggataagaatccacatcaaagatatttttactgaccggttgcaatggaatatcaacaatagcggcacctatacaaataacgtcgagattatccatatcattattccgctttgccatcagaaccgaacagtttaattttttccaatgcccgttcttttacagctttacgtacttcacgttctaaatgcaggaaaggctgatcctggttttctttcactgcaaccattgcggcctgacagagctccgtatgaatgttgattttcgcgatacccaagctaattgcagttttaatgtcggcatcactgatcccgcttgcaccgtgcaaaaccagcggaacagaaacggcatcgcgtacgcgtttgacgacctcaaagttcaattgtggctcactcgtataaaccccatgctggttgccgatggcgacagccaaactatcacagcccgtacgttcaacaaattcagccgcctggtcaggatcggtatagtgatagcccgccagcgcttcctcataaacggtttcattaccgacatgccctaattccgcctctaccggaatacccagcggatggaagaaatcgacagcctctttggttaaacgaatattttcttcgaaatcaaacgcggaagcatcacgcattaaactattcataccatgagtccaggcgttatgaataatctccatactccgaccatgatcccaatgagttattaccggcaccgttgctttttgtgccatacttaccatcatgtgagagaaatcttcaaaactggtgttaccgacaaaacctgtaccaaaagaaataataaccggggatttcgcttcttcggctgcgtcgataacgcccatcaacatttctgcattccatacgttaaaatgggcaattgcataatgtttatttgtggcatcgttttcccaatatctgatatctgcgagcatgttctgttctcccgtattaattaatcgctaattttaataacgcctttaataatgtcgcgtttgttgttaacactctcttcaaatgcctgttgtacatcccgataatcgtaaatatgcgtcaccatgcttttcacatcgaatcgcccactagaaatagcttcaatcgtgaccggataacgattggcatagcggaataccgtctggatagtgacttcgcgattgattttgaggaaattgattgcgctatcgccgggtacagtaccaacaatcataattttaccgccgcgcattaccagataaggtgcctgtttaacggtgaccgcagaacccgctgtttcgaaaacaatatctgcgcccatgtcttcggtaaattgctgacagcgtgcaatagtgtcttcttttgcgccgttaataaccactgtcgcaccaagctgttccgccattgccagacgtttttccagcacatcaacgacggcaatttccgttgctcccaggcatttgcacgcttgcaacgtcatcaaaccaatacaacctgctcccagaataattatcttcttacccggtttaacatctgccagcatcgcggcatgcatcccgactgcggcaggctccaccagcgccccttccatcgtgtccatattgtcgggcagtttgtaagtaaagctctccggatgacacagatagtgcgttaatgcgccgcggtagttgggttgtgtcgccataaaatcaacgtccgggcagatgttatatttgccttccagacagtaacgacagtgaccgcaaggaacgccaggttcgatatttacccgatcccccggtttaaatttgcgcacgcggcttcccacagccacaaccgtcccggcgcattcatgacccaggccaatttcttgatttgggtctttaggcggaataaacgggccactttcaaaaccatgtacatcactaccacaaataccgacatattctactttaatcaaaacttcatcttctttaggcactggtatttctgcactaataattttcattgtgcccggcacctgcaatattgctttactatttttcattttgaatccacccgtattatttattggctactgcatcaatacttaaactttcaacggagacacctttggtttcgattccaatggtggcgatagcaattgcgacaataatactaaccgcccccagaagaataaagactcccgtaacgccataactactgagcagcactgcaacggcataaggtgcggcaataccactgattcgccctaccgcattcgccagaccggagccacggagtttggcctctgtcggccagatttcagggacatacactgcgctggcatagcaagcgtacatatagacgaaagtaatcaggaagaaaccaatcaacgttatgagcaacatactggtttgcagactatagatatatccgagcaccgcaatcaggattaatagccccacacccattgttttacgcggaattttatccatcaccagcatggcaataaaaataccaaatggcgcgccaaacatactcatggtatttaaaacaatgctgtcttttaaattaatcccctgggtcatgaatattgttggcaaccagttaattagtgtgtactgcacaacgttcatggcaatcagcacacaagagcctaatatcacgcgtttcagtaatactcctgtcagtaaggcactatacggcaccgcttgtggcgctttaccgtcatcagcaataaccacaggcggcaaaggtttacccgtctggcgtatgacgccttcttctatactccgcatgactttctcggcttcctgataccgtccgcggctttccagccagcgcggggattcaggaaagtagcgccaggccagcgccgtagcgataaggctcaatattgcagggataagcagttgtacccgccagttccactctgcactaatcagcggcgtgagtcccatcgctatcaaactacagagcggataactccagttgccaataaaggaaacccgactactccacgttccacgatttctaccgggcatatattcggtgaaaccagcaaacagcgtaaccagtaaagctcccagcccaactcccatcacaaaacggcaggcaataaggaaatccatattcggactgaaagcaccgacaaccatgctggcaatatgaatggcctcatagaggatgaacgcatttctgcgaccggttttgtcgccaatgatgccgcccaccagcgcaccgagaaacattccggcggtcgtgattgcactgaatgtggctgtggtggaattatctgtccagcccaacgctttcagctgcgcgaggatcaagccaccaacggcattactccagcagacaagcaagccaaacgcgacgatggcaaacatactactatgccagcggcaatccggtaagcgatccagccgtgcaccacaatgcggttttgttatctgttccatgcgataacgttccttcaggagagtggttattcatcaaagtcgtaagtcatgatcactttgattgcggttttatcgaccatcgcatcaaacccttcgcgccattggctcaggccgatacgatgcgtgatcatcggtttgactttgatagcgccgctggctaatagcctgatagcgttacgccaactggtggagtcataggccatatgcccaatgatgcttttgttccaggcggtaatgtcattaatgctgaaatcaagaggtttgaagcccattccaacgcgtaccacttccccgttcgggcggagcatttcgatggcttgtttcagtgcgatattggcaccggagcattcaatcaccagtcccagattgtctttgccacaaatttgctggcagcgcgccaccacatcttcggtagaaccatttactactgccgtcgcacccagttcttttgcaaccgggaagcggaccgccacatcttcttgcagaccaacgacgacgatatttaccgcccccataattcgcgccatttgtacggagaacagcccgagtgggccagtgccgatgacgaccacatcctgaccaggaaggaatttgctttgctgcgcgatggatttgtaggcattacagatagggtcaagtacggctgcgtcctcataatcaacaccatcagggatttcccacaacgcatgacgatgaattttgagaatttcaccaggaaccagacaatatttggaaaaaccaccgccccaggtattattatccagaccaaggtttactttttctgtacaacacagaaaatcaccttgttcacaggccggacaaacaccgcaaacgtgaccgctgttatcgcttacgacgcgttgccccactttccagtctttgactttttcaccaacctgcgcaatacaacctgcgaactcatggccgcggatagagttaaactcatcagaaccgctatcgacattgtagtgcttcatgtctgcgccgcagattgccgcggctttaatttcaatcactacatcttccgggccacacatgggttgtgggacatcaatcatcttgtagccgccaaaggccttgccaaaccgagccagtgctttcattgcgtcatcctctgtgtttagttttgcttagatggccatcatacttacccacatgatttttgaggtcaacattaaatctgtaaaacacagataatgatctgcgttttacaactcagatcacaattacgcagaaaatggctgggtctgttacaggttgatggaaggcggggcgcaaaaagagcaaattcgagagggattaccggccaaataggtctgagacttaagttcaggagaagtcattcaggtgtgaacgggacggcaagagatcggactgggacttagccaggtcatggcgagataattgagatgagtcgtggggtcattgttggctatccccttcatagccgaggcaaaaaggggatgaaccacttacttaaacatggcaataggctttgcactgataccaaaatcttcttttaactgctgtttgctcttcatgaccatctgaccatttgtgtcaattgtcatatgctgtgcttcgatattatggcgggcttgccacagcatcaccagttgcaggcagttctctttttgttcctcggtcaacgcaacgccatcaggccatttccccagttcaacggcggtgctcaaacgctggtatacctcaggcatcatgctgttgataatgtcatcaagattcataatttttccgctcctgtggaataagttgctgaatcgttttttcaaccgttgatttcttcgccgttttcgccatcggtaaagcgtaaagaggcagagttaacacaataacgttcgcccgttggctgcggcccgtcggggaagacatgccccagatgggcatcacagttaccgcaacgaatttctatgcgctgcattccatgactcaagtctttgatataacgaatggattcttcacttaccggttcgtagaaactgggccagccacagccggaatcatacttggtttgggaatgaaacagcggggcatcgcagatcaaacagtgatatacgccgtcacgcttgttatgcagtaaacgacccgtaaatggcggctctgtcccatgattctgcgtcacgtaaaactgcatctcggacaaattttttttcagttcttctgcgctaggtttattagccatttgctcacatctcactttaatcgtgctcacattacgtgactgattctaacaaaacattaacaccaactggcaaaattttgtcctaaacttgatctcgacgaaatggctgcacctaaatcgtgatgaaaatcacatttttatcgtaattgccctttaaaattcggggcgccgaccccatgtggtctcaagcccaaaggaagagtgaggcgagtcagtcgcgtaatgcttaggcacaggattgatttgtcgcaatgattgacacgattccgcttgacgctgcgtaaggtttttgtaattttacaggcaaccttttattcactaacaaatagctggtggaatatatgactatcaaagtaggtatcaacggttttggccgtatcggtcgcattgttttccgtgctgctcagaaacgttctgacatcgagatcgttgcaatcaacgacctgttagacgctgattacatggcatacatgctgaaatatgactccactcacggccgtttcgacggtaccgttgaagtgaaagacggtcatctgatcgttaacggtaaaaaaatccgtgttaccgctgaacgtgatccggctaacctgaaatgggacgaagttggtgttgacgttgtcgctgaagcaactggtctgttcctgactgacgaaactgctcgtaaacacatcaccgctggtgcgaagaaagtggttatgactggtccgtctaaagacaacactccgatgttcgttaaaggcgctaacttcgacaaatatgctggccaggacatcgtttccaacgcttcctgcaccaccaactgcctggctccgctggctaaagttatcaacgataacttcggcatcatcgaaggtctgatgaccaccgttcacgctactaccgctactcagaaaaccgttgatggcccgtctcacaaagactggcgcggcggccgcggcgcttcccagaacatcatcccgtcctctaccggtgctgctaaagctgtaggtaaagtactgccagaactgaatggcaaactgactggtatggcgttccgcgttccgaccccgaacgtatctgtagttgacctgaccgttcgtctggaaaaagctgcaacttacgagcagatcaaagctgccgttaaagctgctgctgaaggcgaaatgaaaggcgttctgggctacaccgaagatgacgtagtatctaccgatttcaacggcgaagtttgcacttccgtgttcgatgctaaagctggtatcgctctgaacgacaacttcgtgaaactggtatcctggtacgacaacgaaaccggttactccaacaaagttctggacctgatcgctcacatctccaaataagttgagatgacactgtgatctaaaaagagcgacttcggtcgctcttttttttacctgataaaatgaagttaaaggactgcgtcatgattaagaaaatttttgcccttccggtcatcgaacaaatctcccctgtcctctcccgtcgtaaactggatgaactggacctcattgtggtcgatcatccccaggtaaaagcctcttttgcattacagggcgcacaccttctcagctggaaacctgcgggtgaagaagaagttctgtggttgagcaacaacacaccgttcaaaaatggcgtcgctattcgcggtggcgtaccggtttgctggccgtggtttggtccggcggcacaacaaggtctgcctgcgcacggttttgcccgcaacctgccgtggacgctgaaaagtcatcatgaagatgctgatggcgtagcgctgacttttgaattgacgcaaagcgaagagacgaaaaaattctggccgcacgactttacgctgttagcgcatttccgcgtgggtaaaacttgtgaaatcgatcttgaaagtcatggcgaatttgaaaccacctctgccctgcatacctactttaacgtgggtgatatcgctaaggtaagcgtcagtgggctgggcgatcgcttcattgataaagtgaatgacgcgaaagaaaatgtactgaccgatggtattcagaccttccctgaccgtaccgatcgcgtgtatctgaatccacaagattgcagcgtgattaatgatgaagcgctgaatcgtattatcgccgtaggccaccagcatcatctgaacgttgtcggctggaacccgggaccggcgcttagtattagcatgggcgatatgccggatgatggctacaaaacatttgtttgtgtagaaacggcttacgctagtgaaacgcaaaaagtgaccaaagagaaacctgcacatctggcgcaatccattcgcgttgcgaaacgttaatttacgttaatgttgtgtgccgggtgcaatgcatccggcacacaacatcacaccatatccagcgcagtttttccttttggtgccggatatgccttatccagcatagctaattccgcactagaaagttcgacctcaagcacagccgcattttgttggacatgggcaatcgtggccgcttttggaatcgccatcacaccctgatgactgatcacccacgccaacaatacttgtgccgcgctgatattgtgagcatgtgcaatttcgttgactaccgcgttttttaacagtccattgcgcaaccgcccggcctgggctaacggactgtaagccatcaccggcatctgctgttgctggcaccaggggagtagatcgtactcaattcctcgactaccgagatggtaaagcacctgattagtggcacactgatttccccccggcagctgccagagttcctgcatatcagcataatcaaggttagaaacgccccagcggcggatttttccctgggcgatcaatttttccatcgctgcgacagtctcttcaaaagcgaaactgccagaccagtgtaataagtaaagatcgagataatcagtattgagacggcgtaaactggcttcgcatgcatttatcgctttttgcccgccagcattccacggatagactttagagacgagaaagaccttctctcgcagaccggttaatgcttccccaaccaccttttcggcaccgccatcggcatacatttcggcggtatcaatgagggttaaaccgagttcaatgcccgcgcgtagtgcagcaacttctgttttgcgctgactggcatcttcgcccatataccatgttccctgccctacggctggcagactgacatcgccactaaattgaatcattttttgttgcattgtttcctcccaggtattgcaccaccgtaatgcaaaacagggcgtgacgccctgtttttatgcacaaaatgccctggaaagatgcattatcagaatttgtaggtgatcccggtagaaatcaggccagtccaggatttatccaccatcgggctgtcagtaacttcatcagacagacgggtgtagcgtgcggtaccgtaaacactccagtcgccgaggaagttgtagctggcgctcagctccaggtaagggctccagctgtcgttcgggttatagccacgcagaccgctgcgagcggactctttgcggcttacgccataatagtattcgttctggttttcgctgttccactgcacaccaatacccggagtcacggtcaggccaccgttggtgtaacgatacaaccaggccatatcccagacgatgccgttgctgttatccagggtatcgccagccagggtggtacgcaggtaaccgtactgggtaaagtgagcataagacagaccagccatcatggtgctcttacggtcatccaggtgacgcatttggtgatcgccactgtctttcgctttgaagtaaagcgggctccagtaagcggtaatactaagtttatccgttgcgtcattccacaggtagtaaccaccacctaagccacggaaccagaagttatcgccttcatagttgattaccggtactgggtaaacatcggtatcgtaatctttatatgggtgttcaacgacacctacgcctgcgcccagggaaaatttaccttcagcgtgcgctacgcctgcagacgttgcgataagcactccaagtgccagaagtttgagtttggtcacaattaatcattccttaaacaaatgtttagcgggcgacaaagtttacccgtcaatacatcgaaacccaacctttttacgttttcattttttaaagtaactgtttaattttcctgacgcggatgacaccgcgcttacagccaaatgaatttagcgttactggcgagcctggtctttacattaattatgcaaaatttatggatgagttgttgatatgccattgaaattaagaaagccgtgcaggcaagttttccatttgccatctacgcttaattttgaaggtgtatcaccgggcacgttgttctcatcgtcgataaaatggcatgagagttgctgtgttttagcaagagacgtcgttcagtttacctcttccgggagcctctactattcatatgaacggctcttaacctgtgctaaaaaacgaaaggacggcataccatgaatatattcgatcactatcgccagcgatatgaagctgccaaggacgaagagttcacactgcaggagtttcttaccacttgtcggcaagatcgcagtgcttatgccaacgcggctgagcggctattgatggctatcggtgagcctgtcatggtcgatacagcccaggaacccagactttctcgactcttttctaaccgggtcattgcacgttatccggcgtttgaagagttttacggcatggaagacgcgattgaacagattgtctcttatctgaaacacgcggctcaggggctggaagagaagaaacaaatcctgtatctgctggggcctgtgggtgggggtaaaagtagccttgctgagcgactgaaaagtttaatgcagctcgtaccgatttatgtattgagcgcgaacggtgagcgtagcccggtcaacgatcatccgttctgtcttttcaatccgcaggaagatgcgcagattctggaaaaagagtatggcattcctcgccgttatctcggcaccatcatgagcccgtgggcggcaaaacgcctgcatgaatttggtggcgatatcactaagttccgggtagtgaaggtctggccgagtattctgcaacaaattgctatcgccaaaacggaacccggcgatgagaacaaccaggacatctccgcgctggttgggaaagtcgatattcgtaaactcgaacactacgcgcagaatgacccggacgcctacggctattccggtgcgctgtgccgcgccaatcaggggatcatggaattcgttgagatgtttaaagcaccgattaaagtgctgcatcccttgttaaccgccactcaggaaggtaactacaacgggacggaaggtatctccgccctgccgttcaacgggattattctcgcacacagcaacgagtccgaatgggtcactttccgtaataacaaaaacaacgaagccttcctcgatcgtgtttacatcgtgaaggtgccgtattgcttgcgcatttccgaagagatcaaaatctacgagaaattgcttaatcacagtgaattgactcacgccccatgcgcccctggcacgctcgaaacactgagtcgtttttccattcttagccgcctgaaagagccagaaaactccagcatttatagtaagatgcgggtttatgatggcgaaagtctgaaagacaccgatcccaaagccaagagctatcaggaatatcgtgactacgccggtgtcgatgaagggatgaacggtctgagcacgcgttttgcgtttaagatcctctcccgcgtgttcaacttcgatcatgtagaagtggcagcaaacccggtccatctgttctacgtcctggaacagcagattgagcgcgagcagttcccacaagagcaggcagaacgctatctggagttcctgaaaggttatctgatcccgaaatatgccgagtttatcggcaaagagatccagacggcctaccttgaatcctattccgaatatgggcaaaacattttcgaccgttatgttacctacgcggatttctggattcaggatcaggagtatcgcgatccggataccgggcagctgtttgaccgcgagtctcttaacgccgagctggagaaaatcgagaaaccggcggggatcagtaatccaaaagatttccgcaacgagattgttaacttcgtactgcgcgccagagcgaataacagcggacgcaatccgaactggaccagctatgaaaaactgcgcacggtcatcgagaagaaaatgttctccaataccgaggagctgttgccggttatcagctttaacgccaaaacgagtaccgacgagcagaagaaacacgacgactttgtcgaccgtatgatggaaaaaggctacacccgtaaacaggtgcgtttactgtgcgaatggtatttgcgcgtacgtaaaagctcttaacaaccctggcccggtacacatgttaccgggcctacaacgacagcgaaccgtgggcctgagaagcggcaacacaggcgtagcatacagttggcaaatgtagtacggggggcatatgacctggtttattgaccggcgtctgaacggcaaaaacaaaagcatggtgaatcgccagcgttttttacgccgttataaagcgcaaattaaacagagcatctccgaggccattaataagcgtagcgtgactgacgtcgacagcggcgaatccgtatccattcccacggaagatattagcgaaccgatgtttcatcaggggcgtggcggtctgcgccaccgcgtgcatccgggcaatgaccatttcgtccagaacgaccgaattgaacgtccccagggtggcggcggaggttccggcagtggtcagggccaggccagccaggatggtaaaggtcaggatgaatttgtctttcagattagcaaagatgagtatcttgatctgctctttgaagatttggccttaccgaatctgaaacaaaaccaacaacgccagctgaccgaatataaaacgcatcgggcgggttataccgctaacggcgttccggccaatatcagcgttgtgcgtagtttgcagaacagtctggcgcgacgcacagccatgacggcaggcaagcggcgggaacttcatgcactggaagagaatttggccatcatcagcaacagtgaacctgcgcaactgctggaagaggaacgtctgcgcaaagaaattgcagaattacgtgccaaaattgaacgcgtcccttttattgacaccttcgatttacgttacaagaactacgagaagcggcccgatccctccagccaggcagtgatgttttgcctgatggacgtttccggtagtatggatcaatccactaaagatatggctaagcgtttttatattctgctgtatctgttcctcagcagaacgtataagaacgtggaagtcgtatacatccgccatcatacccaggcgaaagaagtcgatgaacatgagtttttctacagccaggaaacaggcggcaccattgtttccagcgccctgaaactgatggatgaggtagtgaaagagcgttataacccggcacagtggaatatttacgctgcacaagcaagcgacggcgataactgggccgatgactctccgctttgccatgaaatcctggcgaaaaaattattacctgttgttcgttattacagctatatcgaaattacccgtcgtgcacatcagacattgtggcgagaatatgagcatctgcaatctactttcgacaactttgcgatgcagcacatccgcgaccaggatgatatttatccggtgttccgtgaactgtttcataaacaaaatgcaacagctaaaggctaaaactatcagccaggtcattatcgcctggctgatttttagcttactgtaaattatctcatttattacatacattagcttacaatcgctttaaatatgacagcataacctttacataatttagttccagaaaacaatcattcggaaaaatgattcagagtacacgtatttccatggggttattctttaaatattttttaagcttaacgaaaattgatcctggtcaaaactatatatctctgccaagtataaaatccagcactcacattgctctcctttttatggtttctatgggtacacaaaaattaaaagctcaaagcttttttattttcagtttattgctgacgttaattttattttgcattactaccttatataacgaaaacacaaatgtaaaactcatcccacagatgaattacctgatggttgttgtggctttgtttttccttaacgccgtcatttttcttttcatgttaatgaaatatttcactaacaaacaaattttaccaacactcattttaagccttgcatttttaagtggccttatctatttagttgaaaccattgtaattatccataaaccaattaacggcagtacactgatccagacaaagagcaatgatgtttctattttctatattttccgccaactcagttttatttgtttaaccagcctggcgctcttttgttatggaaaagacaacatccttgacaacaataagaaaaaaacgggaatcctgttgctggcgctgatcccttttttagtttttccccttctggcacacaatctgagcagttataacgctgactattctttgtatgtcgtcgattactgtccggacaaccatactgcgacctggggaatcaactatacaaaaatattggtttgtctgtgggcatttttactgttctttattatcatgcgcacacgattagccagcgaactatggccgttaatagcattattatgtctggcaagcctatgctgcaacttacttctactgactctggatgagtataattatactatctggtatatcagtcgcgggattgaagtttccagtaaactgtttgttgtgtcttttctgatttataacattttcaggagctgcaactctccagcaaactggcagttcatgatgtgctgaccaatatttataatcggcgctactttttcaacagcgtagagagtttattgagccgacctgttgttaaggacttctgtgtcatgctggttgatattaatcagttcaaacgcatcaatgcccaatggggacatcgtgtgggtgataaagtgctggttagtattgtcgatattatccagcaaagcatccgccccgatgatattttagcgcgactggagggtgaggtgtttggcttgctatttaccgaactcaatagtgcccaggcaaaaatcattgcggaacgtatgcgtaaaaatgtcgaactcctgaccggctttagtaacagatatgatgttcctgaacaaatgaccatcagtattggcacggtttttagtacgggtgacacgcgtaatatcagccttgtcatgacggaagcagataaagccttacgcgaagcgaaaagcgaggggggcaacaaagtgattattcatcatatttaagtgcaaaaatattcagagccatgctttttgcgtggcttttgcatacaatttattactattacccctaaatttcccctccccagcggcgcagagatgagtataattagcgcccctgtgccaggccgcaatcgaactttatctggttttctcgtttcactaaccgaaggagatgcgtataaagcttccgatgagcgtttatatgtcaataagcagaacaaaaacagccgttcatgataaccttctgtggttgtttgcttgtaatctcaggagcgtgaaatgactgaaatggctaaaggaagcgtgacgcatcagcggttaatcgctttattaagtcaagaaggtgctgacttccgcgtcgttacccatgaagcggtaggtaaatgtgaagcggtgagtgaaattcgtggcaccgctctaggccagggtgctaaggcactggtatgtaaagtcaaaggcaatggcgtaaatcaacatgttctggcgatcctcgcagccgatcaacaggccgatctgagccaactcgccagccatataggcggattacgcgctagcttggccagcccggcggaagtcgatgaactcacaggctgtgtcttcggcgcgatcccccctttcagcttccatccaaaactcaaactggttgccgaccctctactcttcgaacgatttgatgaaatcgccttcaatgcaggcatgctggataaatccgttattttgaaaaccgcggattatttgcgcattgcgcaaccagaactggtcaatttccgccgcactgcgtaattagccggtccgttcgataagaagaacggacaaaaccagtacaacagcaatggcaaaaaagctactcgtgataatcagtgtctcgacaaacatttgatcgttcatagcatgcccccgggagatagctgttttcacgttattgttagcgtgcacaaatggcagtttgatgacagttcgcctgattttttatgcaaaaaacgtaaagattttctacttccttcctgcagcaagcgtaaagtaagcaggcttattattttttggcaaggaaaccacgatgtttgatgtcactttgctgatcctgctcgggttagctgcgctgggctttatcagtcataacaccactgtcgccgttagtattctggtgttaatcattgtccgcgtcacaccgttaagcaccttttttccgtggattgaaaaacaggggctaagtatcgggataatcattctgacgattggcgttatggcccccatcgccagcgggacgctaccgcccagtaccttgattcacagctttctgaactggaaaagtctggtggcgattgcagtaggcgtgattgtctcctggctgggtgggcgcggcgtgacgttaatgggcagccagccgcaactggtcgccgggctgctggtaggcactgttttaggcgtagcgctgtttcgcggcgtaccggttgggccgcttattgccgcgggtctggttagcctgattgtggggaaacagtaattattgccgcgggtctggtttcgcactttgtggggaaacagtagttaatctcgcaatatatcggcctggcgtttgccccaggcctttcttaaacatagtaataaaggccgttgtactatcataccccagcgtatgagcaactttctgtacagtatcgcctttcactaatccctgaagcgccataatcagctgtaactgctgacgccactggcgaaaactcaaccccgtctcttttactatcagtcgggcaagattgcgttcactcatcgcaaaaaagccagcccattgccccaatgccccccactcgacaggccctttcgccatcatctccaccatcgtgcggattttaggatgagaagaaacgggcaggtgcagctgttgttgtggctgctgagggagttcatcaaacaggacctgaattaatctgcgggtcattggctcagcacgctgagtcgtcgtcctgtttgccagggttaaaattaattcccggcataaggggcttattttcaatgtgcaacatgttgtcggcattgtcactgcgctgggttcgataaacagaaaacagagttcagcattagctgttacttgattgctatgttccaccccgcccggtatccaaaccgcatattgtggcggcaccatccacaaagcattttccaccgtacaggtaattgcaccatgtagcgccagtatcagctgtcctttgcggtgctgatgtacaggactggttaactcatccgttccggcgtgaatacaaaatgcgaccgcggcttcatggtgtcggtcgggttcatagccattgagattcaacctgtgcatcattttgtccgaacttagcgataatttgtcattttagcttgattcaacataacaataaaaacggtaaggtacagcctcgtttgtaacaatgagaagcatatgacctgtagtactagtttaagcggcaaaaacaggattgtccttatcgctggcattctgatgattgccacaacattacgcgtcacctttaccggcgcagcaccgttactggatacgattcgttccgcttacagcctgacgacagcgcaaaccggcttattgaccaccctgccattattggcctttgcgctaatcagtcctttggctgccccggtagcgcgacgttttggtatggaacgtagcctgtttgccgcgttacttttgatctgtgctggtatcgcaattcgctctctccctagcccttacttattatttggcggtacagcggtcattggcggtgggattgcattaggcaatgtcttactgccaggattaattaaacgcgatttccctcattccgtcgccagacttaccggcgcatattccctgacaatgggagctgcagcggcactgggaagcgctatggtcgtgccgctggctttgaacggttttggctggcaaggcgcgttgctcatgctgatgtgttttcctctgctggctctttttttatggctgccacagtggcgaagtcaacaacatgcaaatttgagtaccagccgcgccttacatactcggggtatctggcgtagtccgcttgcctggcaggtcacattgtttcttgggatcaacagtctggtctattacgtgattattggctggcttccggcgatcctcatcagtcacggctatagcgaagcacaggcgggtagtctgcatggtttgctgcaactagccacagcagcacccggtttgctgatcccacttttcttacatcatgtgaaagatcagcgtggtattgcagcgttcgttgccttgatgtgcgcagtgggcgcggttgggctctgctttatgccagcgcacgcgatcacctggactctgcttttcggttttggttccggcgcaacaatgatactggggttgacgttcattggtctgcgggctagttctgcgcatcaggcggcggcactcagcgggatggcacaatccgtcgggtatttgttggcagcctgtgggccgccgctgatgggtaaaatacacgatgctaacggtaactggtctgtaccacttatgggtgttgccatacttagtctactgatggcgattttcggactttgcgccgggagagacaaagaaattcgctaatatccggtgctatagtgacgtaacaaatcatgcgtgaaagggagaacaaacacgatgaatattcagtgcaaacgcgtttatgatccggctgaacagagcgatggttatcgcatactggtcgaccgcctctggccgcgcggtatcaaaaaaaccgatttagcccttgatgagtgggataaagaaatcacgccgagtacggaactgcgcaaagcctttcacggcgaagtcgtcgattatgcaacctttcgcgagcaatatcttgcagaactggcgcaacacgagcaagaaggaaagcggctggcggacatcgccaaaaaacagccgctgaccctgctctacagtgcaaaaaacaccacgcagaaccatgcgctggtgctggccgactggctacgtagcttgtgattttagtacagcatccggcggttatttttcaccagccggatggtcacgccgccacaatgcccattcatcaatcgtttcaccgcccggtaatttgcaattgttgctgaccccttgcgctgtctgcactggaatgagcgtcccgcccttctgctggcaatagacgctcgccggatttgccataccaatctgcggcggtttaggtgcttctggctgagaaggggtactacaaccagccaggaccagcaagcaaggcagaacaaaactgataattttcatttattgatctcacatatttatccaagattagagtatcgcggtatcgttttgttttgcagcactatttttattacattcactcaaaacatattacgtcttgtttcatctttgttgatgatgttttatcatgcctgcaaagattaaataatcagcatttacccgccgtatcctggagttgttccgtgagtgatcagattatcgcccgcgtcagccaatcccttgccaaagaacagagtctggaaagtctggtccgacagcttctggagatgctggaaatggtcactgatatggaaagtacctacctgaccaaagtggatgtcgaagcgcgcctgcagcatattatgtttgcccgtaacagccagaaaatgtacatcccggagaattttaccgtcagctgggattacagcttatgcaaacgcgccattgatgaaaactgctttttcagcgatgaagtccccgaccgttggggtgactgtattgcggcacgcaatcttggcatcaccacatttctgagcacgccaattcacttaccggatggaagtttctatggcacgctttgcgccgccagcagtgagaagcgccagtggagtgaacgcgcggaacaggttttacagttattcgccggactgattgcacaatatattcaaaaagaggcactggttgaacagctgcgcgaagccaatgctgcgctgattgcgcaaagctataccgacagcttaaccgggctaccgaatcggcgggcgatttttgaaaatctgacgacactgttttccctcgcccggcatcttaaccataagataatgatcgcgtttatcgatctggataacttcaaattaatcaatgatcgttttggtcataatagtggcgatctgtttctcattcaggttggcgagcgccttaatacgctccagcaaaatggcgaagttattggtcgtctcggcggtgatgagtttttagttgttagtctaaacaacgagaatgcggatattagcagcctgcgagaacgcattcagcagcaaatacgtggagaatatcacttaggtgatgttgatttgtattatcccggtgccagtcttggcatagtagaagtcgatcctgaaacaaccgatgcagacagtgccctgcatgctgccgatattgcgatgtatcaggagaaaaaacacaaacagaaaacaccttttgtcgcgcatccagcgctacattcctgaggcgtattcacatccttttgattggtgataacatgcgaatcggtattatttttccggttgtaatcttcattacagcggtcgtatttttagcatggttttttattggcggctatgctgccccgggagcataaagatgaaaaaaacaacgattattatgatgggtgtggcgattattgtcgtactcggcactgagctgggatggtggtaacgtcacctctaaaaaatagcaaaggctgcctgtgtgcagcctttgtgcaatttaagcgttaacttttaatcttcctgtagataaatagcacgacaatcgcaccaataacggcaaccacgaagctgccaaaattgaagccatcgactttaccaaagccaaacagcgtgctgatccatccgccgactacggcaccgactatccccagcaggatagtcataaagaatccacctccatctttacctggcatgatccacttcgccagaataccggcaataagcccaaaaataatccaactcagaatgcccattgtttcctcacttatctgttttgcattagcgggttagtcgctgataaaaagcatagcacaacatcgggagggcaagatttgtgacgagcatcacggaggttttttttgcgatggcgcagaaattgcgccatcaacgatcagtgataattaccaaccacaaacatcatgttcgttttccgtgtcataagaacgtacggtattcaccagatcttttatcacttcagccgccacttctggcaccagcaaagtcatcggcgtctctgtttcataatcgacagaaacgccattgctgttattggtgacggtcacggtatacgttgctttgcccatgattcatttcccgttatgaatgactttccgttgttgcgcaccttccatcaggacttcaggagccacgaagaagtcaatgttgaaataagtatcgtcagtcatggcttcaatgttgtgccacttttctggagggaacaccgcaaactgccccgcttcgataaggatcacctgatcaggctctgcactgtgttcatcagcgtagccgagatatttgaccgccccatgcataacggaaaggcgtgggtaaacccccgggcgcgttcctttatcaagatgacgttcgaatattccggcaggtgcagtttgtttattccagaaaggcgtactgcgcgtatgaatataattctgtgggatttgaagcatccttttccctccttcggtgaatgcgctgaaaacggtttattccagccgtttcagggtacgcctgataatttgcattttaaataccatttattggttactttttagcaccatatcagcgaagaatcagggaggattatagatgggaagcccgcgacaacgcgggctgaaagcatcaggattgcagcgtcgccagtcgggcagcgaaacccacgaacatcaaaccaatcagactgttgccaactttagccagtttctttttggtacgtatgtactgcgtgacaaaagcaccagatataatcaggaagctcaaatagcagaaactcaccagttccagcgtcgccgccagaataaagaaactaattcccgtatgtggggcattaacatcgataaactgtacgaaaaagctcacatagaacaaaatggctttcggattagtcaggctcaaaattaacgcgcgtttaaaaatagcaccgtattggggctcatcggatttggcctcgctatttttacccttcagggtcgcgtaaagaattttactccccagatagagcaaataaaacgcaccaagataacgtacaatgttgaataatatcggggtggtcttaattaatgtcgccactccagcccatgccagaaacatcaataccgcatcgccaataaatacaccgcaggccgcaagataaccgcctttcataccgctactgacgctatttttgagtacaaacagggtatttggccctggcaccaacacaataaaaatggccccaaccagataggtccagtaattcagaaccccgtattcagcgaacacattaacctctttaattatctttcgatcatgcgcgattaaaggtgaatatgctaaccaatctgtagcggcttagaaaggagaaaatcaggttttaacctgatatcaacccgataattgaatcattaatcaggcatgctccagactaaaattcgggtagtgctcggcaaaatactggcgtaaaaattctaccgttatccgcactttcgcactcgtcgccagcctactaacataaacggcccagacgttcgctggctggtaatattccggtagcacttgcactaaatgaccactggcaatgttttcgctaacatcccaccaggaacgcagagcaatcccctgcccatcgagacaccactgatggacaatttctccatgattagagctcagtgggccggtgactttaatcgcatgggggccttctttattgcgtaattgccagacaccaaaaggatgatcgcgctctttaatgaccaggcacggcaatgcagaaagatcggttaaatgtttcggcgcgccatgttgcgcaataaattccgggctcgcgcagagaatacggtaattggtcgccagtttgcgggcgattaaattaggggcgatgtcatcgccaatgcgaatatcgagatcgacaccttcattgaccaaatcgaccagtcggtcttccacatcaaaacgtaattccagttgcggatacgccttcgccagcgctaataacgccggagccaccacctgtcgtccaaaaccaaagctgctgataatacgcagcatcccctgcggcacctgacgcacgtcagaaagttcgtccatcatctgaccgacatcctgcaaaatccgctgcgcccattcataaatccgctctccttcttcggtaatggtgacgcggcgggtggtgcggtgtaacaacaccacgtttagcgtttgctccagcaaggcgatgcgcttgctgacgaacgccggactaacgcccagttcttccgccacggcggcaaaaccagcccggcgagccaccagcataaagacgcgcaaatcattcagcagcggtaaattattcatgattcgtgttttatgtttcaccagttacggggattaattccttttcagtcaattataggatggtgatgttgtcaattttgatggtcaggaagtgagaacccaatgatgaaaacgatgcgtattgctgcgatcccgggagacgggattggcaaagaagtccttcctgaagggattcgcgtgttacaggctgccgctgagcgctggggcttcgccttgagttttgagcaaatggagtgggcgagctgcgagtattacagccatcacggtaaaatgatgccggacgactggcatgagcaacttagccgtttcgacgccatctattttggtgccgtcggctggccggataccgttccggaccatattagcttgtggggtagcctgctgaaatttcgtcgtgaattcgaccagtacgtcaacctgcgcccggttcgtctctttcctggcgttccctgcccgctggcgggaaaacagcctggcgacatcgatttttacgtggtcagggaaaacaccgaaggcgaatattccagcctcggcggtagagtgaatgaaggtacagagcatgaagtcgtcattcaggaaagcgtatttacccgccgtggtgtcgatcgcattttgcgttatgccttcgaacttgcgcaaagccgtccacgtaagacactaacttctgccactaaaagcaacggtttagccatcagcatgccgtactgggatgagcgagtggaagcaatggccgagaattacccggagatccgctgggacaagcagcatattgatattctctgcgcgcgttttgtgatgcagccggaacgattcgatgtggtggtggcgtccaatttgtttggcgatatcctttccgatcttggcccggcctgcaccggcaccattggcattgccccatccgccaacctgaatccggaacgcactttcccgagcctcttcgagcctgtccacggttccgcgccggatatctacgggaaaaatattgctaaccctatcgccacgatttgggccggggcaatgatgctcgattttctcggcaatggcgatgagcgtttccagcaagcgcataacggtattctggcagcaattgaagaagtgattgctcacgggccgaaaacacctgatatgaaaggcaatgccaccacgccacaggttgccgacgcgatttgcaaaattattttgcgttaaggtcaaaccagtttatttgaaccgcgtcactgacgcggtttttttattcgttctttgcagtaaataacctgcgtcatttcaccttttattgtttccgtttcgtgttttatggctttccgtattcttaattgtttaatttatgtaacatgcaaattttgttacgcgtacgttaggttccgccgtacaggtattggttttgctggcaatgggactggtgatttatttagccaccagtaaatacggcaatattcgtcttggcgaaggaaaaccggaatacagcacgctctcctggctgtttatgtttatttgtgccggtttaggttcttctacgctttattggggggttgctgaatgggcctattattatcaaacacctggattaaatatcgcaccgcgtagtcaacaggcactcgaatttagcgttccctactctttcttccactggggcatcagcgcctgggcaacttatacgctggccagtttaatcatggcttatcactttcatgtgcggaaaaacaaaggtctgagcctttccggcattattgctgctattaccggcgttcgcccgcaaggcccatggggaaaactggtcgatttgatgttcctgatcgccactgtcggcgcactgaccatttcccttgttgttaccgcagcaacctttacccgtgggctttccgcgctgaccggtttacccgataacttcaccgtgcaggcatttgtgatcctgctttccggcggcattttttgcctaagcagctggattggtatcaacaacggtttgcaacgtctgagcaaaatggttggctggggcgcgttcctgctgccattactggtgctgattgtcggcccaaccgaatttattaccaacagcatcatcaatgccatcggcctgaccacgcaaaacttcctgcaaatgagcttattcaccgatccgcttggcgatggtagttttacccgcaactggaccgttttctactggctgtggtggatcagttacacccctggcgtagcaatgtttgtcacccgcgtttcccgcggtcgtaagattaaagaagttatctggggactgatcctcggcagcaccgtcggttgctggttcttctttggcgtaatggaaagctatgccattcatcagtttatcaatggcgtaatcaacgtcccacaggtgctggaaacactgggcggcgaaacagctgtacagcaagttctgatgagcttgccagccggtaaattgttcctcgccgcatacctgggcgtgatgattattttccttgccagccatatggatgcagtggcctacaccatggcggcgaccagtacgcgtaatctccaggaaggtgacgatcctgaccgtgggctgcgtcttttctggtgcgtggtgatcactctgatcccgctttccatcttgtttaccggtgctagcctggaaacgatgaaaaccaccgtcgtgctcacagcccttcccttcctcgtcattttactggtgaaagtcggcgggtttattcgctggctgaaacaggattacgccgacattccggctcatcaagttgaacattatctcccgcagacaccggttgaagccctggaaaaaacgccagtgctccctgcgggaaccgtattcaaaggcgacaactgagcgccatcatcctaacgataaaggtatccctatgagcaatctgagccctgactttgtactacccgaaaatttttgcgctaacccgcaagaggcgtggaccattcctgcccgtttttataccgatcagaacgcgtttgaacacgaaaaagagaacgtcttcgccaaaagctggatttgcgtcgctcacagcagcgaactggcgaatgccaatgattatgtgacgcgtgagatcattggcgaaagcatcgtgctggtacgcggtcgtgataaggttttgcgcgcgttctataacgtgtgtccgcaccgtggtcatcagttgttgagcggtgaaggaaaagcaaaaaatgtgattacctgcccgtatcacgcatgggcattcaaactcgatggcaacctggcccatgcacgtaactgcgaaaacgtcgccaatttcgatagcgacaaagcgcaactggttccggtgcgtctggaagaatatgccggattcgtcttcatcaacatggaccccaacgccaccagcgtagaagatcaattacccggcctgggcgcgaaagtgctggaagcctgcccggaagtccacgatctgaaactggcggcccgctttaccacccgcacgcctgccaactggaagaacattgtcgataactatctcgagtgctatcactgtggtccggcgcatccaggtttctccgactccgtacaggttgatcgttactggcacaccatgcacggtaactggacgctgcaatacggtttcgccaaaccgtccgaacagagctttaaatttgaagagggtacggatgcggcattccacggtttctggctgtggccgtgcacgatgctgaacgtcaccccgatcaaagggatgatgacggtcatttatgaattcccggtggattctgaaactaccctgcaaaactacgatatttacttcaccaatgaagagttaaccgacgagcaaaaaagcctgattgagtggtatcgcgatgtgttccgtccggaagatttacgtctggttgaaagcgtacagaaagggctgaaaagccgtggctatcgtggtcaggggcgcatcatggccgacagtagcggtagtggcatttccgaacatggtatcgcccatttccataatctgctggcgcaggtgtttaaggactaatgacatcggcggcggtattttccgccgctgggctgatttttgatggagtacagcaatgagtgactatcaaatgtttgaagtacaggtgagccaggttgaaccccttaccgaacaggtgaaacgcttcacgctggtggcaaccgatggcaaaccattacctgcgtttaccggaggaagtcacgtcattgtgcagatgagcgatggtgataaccagtacagcaatgcgtatagtctactgagtagcccgcatgacacctcttgttatcagattgccgttcggctggaggaaaacagccgcggcggttcccgctttttgcatcagcaggtaaaagtgggcgatcggttaacgattagtacgcctaataacctgtttgcgctaattcccagtgccagaaagcatctgtttatcgcgggcggtattggtatcacccctttcctgagccacatggcagagctgcaacacagcgacgtcgactggcagctacattactgcagccgaaatccagaaagttgcgcatttcgtgatgagctagtccagcatccgcaggctgagaaagtccatttgcatcatagtagtaccggaacacgactggaattagcgcgattattggcggatatcgaacctggcacacacgtttatacctgtggccccgaggcgctaattgaagcggtaagaagtgaagctgcgcgtctggacatcgccgccgatacgctgcactttgagcaatttgctatcgaagacaaaaccggcgatgcatttaccctggtgcttgcccgttccggaaaagagtttgtggtgccggaagagatgactattttgcaggttattgaaaataataaagccgcgaaagtggaatgtttatgtcgtgaaggggtatgcggaacctgcgaaacagcaatactggaaggtgaagctgaccatcgggatcaatattttagcgatgaagagcgtgccagccagcaaagtatgttgatctgttgtagccgtgcgaagggtaaacgcctggtgttggatttgtaatttgccgaagccggatgtggcgctgagcgcgcccagtccggcttcggaagattttactgcggatattcctgcaataaattgtgtaatgcttccgccatcagctcaccacgccagccggaaatcagctccggcaaattgttctgcggtttcagtttccagtgccagttcagcagttggttgatttgccgacggcttgccagcaattcggcgctgatcttatgcgtttcgctcacgtcagtaatcaggctcttaatcgctttaaacgctttacgataacccggcatgtccatcaggttaagcatcggctgcggtaaggcatcttccggcaatgtctgcgctttttccaccagcgctagcagcgttttaccgtgaaagcggatttcgctaccggataaacccaggctgtccagttcgcctaaacttcccggcatataacgcgctacgctccacaaatgctcttcacgcacgacaaagttcaccgccagatcgcgctctcgcgccttgcgcagtcgccagtcggctaacagttgcagacaggccagttggcgtgtgcgtaattgccaggcattggtgatatcacgccaggcatcttccggcgcaacgacttcctgacgacgcatttgcatcaggcggcattcatccagcgccgcaggtagccagccggaggcctccgtttctaccataagcttggcggtgatcggtaacagataccagacatccgccgctgcgtattcacactgacgttcggtcagcggtctggccagccagtcggtgcggctttcactcttgtccagcgtaacgccggaatactcttccaccatggaagcgaaaccccaactcatcgggcgtccgcagaaggcagcaaggatttgcgtgtcaatcaagggttgtggtaattcgccaaagacattgaggaacacttccagatcttcactgcctgcatggagaaattttgtgatggacggatcgcgcaggatcgctttcagcggactccagtcggtgatcccgagtggatcgattagcgccagatgctcgccatcgaaaagttgaatcaaccccagctgcgggtaataagtgcgcgtacgaacaaattcagtatccagggctatcgccggaaaggcacggacggcttcacacaaagaagccagcgcatcgtccgtggtaatcatttggtaattcaaattgttttctctttagtgggcgtcaaaaaaaacgccggattaaccggcgtctgacgactgacttaacgctcaggctttattgtccactttgccgcgcgcttcgtcacgtaattctcgtcgcaaaatttttccgacgttagatttcggtaactcatcacgaaactccaccagcttcggtactttgtatcccgtgagctgacggcggcaaaaagtcaccagactctcttcggtaaggcttggatcttttttcactacgaagattttcaccgcttcaccactggagccggaaggtacgccaacagccgcgacttcctgtacgccaggatgctgcatgacgacatcttcaatctcgttgggatagacgttaaaaccggaaaccagaatcatgtcttttttacgatcgacaatgcgcaggaatccttcttcatccattaccgcgatgtcgccggtgtgtaaccagccatttttgatgatttcatcggtagcatcgggacgctgccagtaacccagcatcacctgcggtcctttgacacaaagctcacccggttgacctggtggtacttcattatcatcatcatccaccagtttggcttccgtgctcggcaccggcaaaccgatgctaccactatgataatcaatatcatatgggttaacgctgaccagcggcgcacactcggtaaggccatagccttccagcagatactgtccggtcagtttcacccaacgctctgccaccacttgctgcactggcatcccaccgcctgcggaaagatgcagactggagaaatccagctgctggaactctttattgttcagcaacgcattgaacaaggtgttaacgcccgtgatagcggtaaacggatatttcgctaactcttttaccaaccctggaatatcgcgcgggttagtgataagcaggttctgcccacccagttcgataaacagcaggcagttaatggtcagggcaaaaatgtgatacagcggcagcgccgtcaccaccagctctttgcccggatgcaacagcggaccataggtcgcgttaacctgttccaggttcgccagcatattgcggtgagtcagcatcgcgcctttcgccacaccagtggtgccgccggtgtattgcagaaaagctaaatcttccggcaccagttcgggtttgacgtactgcatccggtagccgttatgcagtgcgctacgaaaactaatggcatctggcagatggtatttcggcaccaaacgcttgatgtatttaacaacgaaattgactaccgtgccttttgccgtagatagctgatcgcccatacgggtcagaattacgtgctgaacggcggttttatcaaccactttttccagtgtgtgagcaaagttagacacgataacaatcgcgcttgcgccgctatcgttaagctgatgctcaagctcacgcggggtatacaacgggttaacgtttacgacgatcatcccggcacgcaaaatgccaaacagcgccaccggatattgcaataaattaggcatcatcaacgcaacgcgatcgcctttcttcagccccaacccttgttgcaaataagcggcaaacgcgcgactgcgttcttccagcttgcggaaggtcattacctcccccatattcacaaacgcaggttgatcggcgtagcgcgcgacgctctgctcaaacatatctaccagagattgataacggtcagggttgatctccgtcggaacgtccgcgggataacggttaagccaaaccttcttcaattcttcacctctaaaatgcgtgttcgtcgtcatcgcaaccccaaatgatatacatgccgttaacataatattaactcatcataccagcttgataattacccaacgaaaaggttgcgaagcgcgtcactatttatttttatctttaccgtaagaatgcagaaacagcggaccagccgctgtttctttttctttaaaaacaagcaattattcagttacaactgtttgtactctcgcggggccgggattataccagccccatccgccgtagccatagggccagccacgaccgccataaaaccatggatcaatcggctgaggcggcataatcacctgctgggttaaatgccaacgtttgtaacccgttacttgcatcaccataaatttatagggcgtattgccgattttgccgtcaaccgcaccagtgattggcccgactaccgtaaccagttgtccacggaaatccaccgggtccagaaaaccgttcacatcggcataaatgcgaccgcgagaaggttctcccagcgtcggtctggctccgctgtccagcggtacggtagcaatttccaggcgagttttcccttgctggttttgtaccgcaaccactttgccaccaaagcgtgcctcctgaccaacgtacagctgcggcgcactcatcacccgaactaaatcttgttgcggcgtgggactgctgcctttaatggcgtccggcacagtgacacaaccgctcagcattagcgcaaacgtacctgccagtatgcctttgataacattcttttgaaccgccatggtgcgactcctttttttctcagggcatactcttaagattcattctttgcccggaagtttcttccatgcgacgttgttacgtaaataaaccggttcggcatgttccaccgccaccgttttaccctcagcaaacatctgacacgcaatcggcagcatatcttcagcagcaggcagtaacacttcgccatcgcgcaaaaccagcccgctctctttaccgagatccggccaagcttgccagcccgtccctaccgtcacccattcgccggaaagctgttgcattcgttcatggacgatttcgggtttgagtacggcttcggtttcttcaccgtgccagataccgttttcatcacgctgatattcggcccagtaaacttcgcccattcgcgcgtcaatggctgccagcacgcgggttgcgccgtttttgcgccacgccccttgcgccatcgtcattagcgtggagacgccaatcatcggtaattccgcgccaagcgccagcccttgcgcgatgccaataccaatgcgcacgccagtaaagctaccggggccgcgcccgtaagccagagcgttaatatcagtcagggaagttccgctggtggtcaggatatcctgcaccatcggtaagattcgttgagtatgttcacgagggcaaagctcaaaatgagcgttgacagtaccgtcgttccacagggcgacagagcaggcctctgtcgcggtatcgatagccagaattcgcatgggtcttcgtgcttagatcaataaaaaggcgcgcatcataccatactccgtaacaaattacctggaggatggtatcgcaaggaaacgaaccgcacgggcaatgtcacgggtgcgtggcgcgggcggcagactggcgagaaacgtcgcgccgtaaggacgcatcaccagccgattgtcacaaatcaccagcacgccacgatcgtcggcgtcgcgaatcagtcgccctaccccctgtttgagagtaatgacggcatctggtagttgcacttcatcgaacgggtcgccaccgcgcaaacgacaatcttccatgcgcgcttttaacagtggatcatccgggctggtaaacggcaatttgtcgataattaccaaactcaatgtatcgccacgcacgtccaccccttcccagaaactgctggttgccacaagaagcgcattaccggcgctgacaaattgctgcaacagttgccctttgctggtttccccctgcaacaatacaggaagcgtcatggtagcgcggaactgctcggccagatcgcgcatcatggcgtggctggtacaaagcataaaacaacgaccgttgttagcttcgatgatcggtcgcagcattgccgctaactggcgagcagaacctggctggttggtttgcggcagattgcgcagcacacagagtaacgcctggcggctgtaatcaaatgggctgggcaacagcaagctctcggcctgttcgatgccaagccggctggtgaaatgatgcagatcgtcgttcacgctcagcgttgcactggtgaagatccagctaccgggtttttgcgccattaactctttgaatttatccgccacgctgagcggcgtgagagccagagtaaaatggcggctagtgcattcgtaccagtagctgtagcccggctgattgatctcttttagccgcttcagccgtgtgcgatacaacgtggcgcgctcaaatgccgcatccagcaaggcggaacgccccagactcagtttcgccacgtcataacaaagttccagggtgtcatcgagcagtaaaaatgcccgctgaatttgcggattagctaacagctcacgcaggttaccgcgataacctggctcaccgagttgcagacgaaaatcctgcgcactctgggcaagacgatcagcgcacttttgtaactgctgggtgtcttttaattcggtgcggtaggcgatggtgatgtcttttgccaggtcgagcagttgtcgactggagagactctgaccaaaatactggctggcaatgtccggtagctggtgggcttcgtcgaagatcatgacgtccgcttccgggatcagttcgccaaatccactctctttaaccaccatatccgccagaaagagatgatggtttaccaccaccacatcggcgtccatcgcttttttacgtgctttgaccacaaagcaatctttatacatcgggcagtcgctgccaagacagttgtcgttggtgctggtgaccagcggccacgcctgactatcttccgccacgctgacgcaggtgctgatatcaccatcgactgtttgattagaccaggagcgcagcaggatcacatcgcttaagatttgtaccggcagatcgccccccgccagcgcctgctgttcgagacgttcgaggcagaggtagttactgcgccctttcagcagcgccacgttgcccgtatatttcaatgccttactgactgttggcaaatcgcggctgtagagctgatcctgcaacgctttactgccggtgctgataatgactttctttttcgcccgcagcgcaggagccaggtaagcgtaggttttgcccgtaccggttcctgcttccaccaccagcggctggcctttttctatcgcctgggtgacggctaccgccatctgtcgctgtggttctcgcggcttaaagcctggtatcgctttcgccagctgaccgtctggtgcaaaatcgtccgtcacactaccccctgttgatttgaacagggattatgtcaggatgagggcgctttcgccagttgaagtggtgacggcgacctcacattgtggcagtctttgcagcacgaaaatggaagtataatgaggacaaaatgatgactatcgttcgtatcgatgctgaagcccgctggtctgatgtagtaatccacaacaacacgctctactacactggtgtaccggaaaacctcgacgccgatgcctttgagcaaaccgccaacacgctggcacagattgacgccgtgctggaaaaacagggcagcaataaaagcagcattctggatgccaccattttcctggccgataaaaacgacttcgcggcgatgaataaagcgtgggatgcttgggttgtcgcgggtcatgcgccggtgcgctgcacggtacaagcgggtttgatgaacccgaagtataaagttgaaattaagattgtggctgcggtgtaagctttatcgaagcaaaataagtcagacgataatttatcgataatactggtcggttttacataaatcgaccagagaataagatattactgttgatgcttctgctaattcattatttatatttataatttcaattttatctataaaactaactatataaataaacataaacatgccgttgtgttcgccctttgattagcaactctggttttctttcttagctgaacaatctggttatagcgtgcggactgaccgttaaatttctccatcttactggataacacaccatgagctgctacctttaaaacacctgaatgtcaacaggttaactcgtgccatatcgttataatccctttgatattagatgcaaattaaggtcatatatagccttatcgataacatggttaattttaaggataagaatatgcctgctgtaatagataaagccctggatttcattggtgccatggatgtaagtgcgccaacaccaagtagcatgaatgaaagcacggcgaagggaatctttaaatatttaaaagaactgggagtacccgcgagtgccgctgatattacggcgcgagctgaccaggaaggctggaaccctgggttcacggaaaaaatggttggatgggcaaaaaaaatggagacaggtgaacgttctgtgattaaaaatcctgaatactttagtacatatatgcaggaagaactaaaagcactggtctgagttaaatttatatcagcataaatgggtcaggacgcttttaatcacatataaaaagcgtcctttttctcacaatcaaatgatcatcggcttctataacgaaatcgatacggattagtgtgttactcgtcttcatcctcaaaacgcgccacgattcgctcgccggagtggttggcacgcagctcttctgccaccagcgcgattgcctggccgctgctcatcccttgtgccatcagttcctggatccgctcgacagctttttgctgctgttcatgggtgagactaggtaaacctgcaaacattgttaactcctgctaaattgttggcgctaattatttcatgctacccggcacatagccagtagagtcaggactgatgaagacgttatctcccgctgtgattactttactctggcgtcaggacgccgctgaattttatttctcccgcttaagccacctgccgtgggcgatgcttttacactccggctatgccgatcatccgtatagccgctttgatattgtggtcgccgagccgatttgcactttaaccactttcggtaaagaaaccgttgttagtgaaagcgaaaaacgcacaacgaccactgatgacccgctacaggtgctccagcaggtgctggatcgcgcagacattcgcccaacgcataacgaagatttgccatttcagggcggcgcactggggttgtttggctacgatctgggccgccgttttgagagtctgccagaaattgcggaacaagatatcgttctgccggatatggcagtgggtatctacgattgggcgctcattgtcgaccaccagcgtcatacagtttctttgctgagtcataatgatgtcaatgcccgtcgggcctggctggaaagccagcaattcagcccgcaggaagatttcacgctcacttccgactggcaatccaatatgacccgcgagcagtacggcgaaaaatttcgccaggtacaggaatatctgcacagcggtgattgctatcaggtgaatctcgcccaacgttttcatgcgacctattctggcgatgaatggcaggcattccttcagcttaatcaggccaaccgcgcgccatttagcgcttttttacgtcttgaacagggtgcaattttaagccttagcccagagcggtttattctttgtgataatagtgaaatccagacccgcccgattaaaggcacgctaccacgcctgcccgatcctcaggaagatagcaaacaagcagtaaaactggcgaacagtgcgaaagatcgtgccgaaaatctgatgattgtcgatttaatgcgtaatgatatcggtcgtgttgccgtagcaggtagcgtaaaagtaccagagctgttcgtggtggaacccttccctgccgtgcatcatctggtcagcaccataacggcgcaactaccagaacagttacacgccagcgatctgctgcgcgcagcttttcctggtggcagtataaccggggctccgaaagtacgggctatggaaattatcgacgaactggaaccgcagcgacgcaatgcctggtgcggcagcattggctatttgagcttttgcggcaacatggataccagtattactatccgcacgctgactgccattaacggacaaattttctgctctgcgggcggtggaattgtcgccgatagccaggaagaagcggaatatcaggaaacttttgataaagttaatcgtatcctgaagcaactggagaagtaagacgtggaataccgtagcctgacgcttgatgattttttaagccgctttcaacttttgcgcccgcaaattaaccgggaaaccctaaatcatcgtcaggctgctgtgttaatccccatcgtccgtcgaccgcaaccggggttgttgctgactcagcgtagcattcatctgcgtaaacacgctggacaagtggcattccctggaggtgcagtcgatgacacggacgcaagtgctatcgccgccgcgctgcgcgaagctgaagaagaggtcgctataccgccttccgccgttgaagttatcggcgtgctgccgcccgtcgatagcgtcactggctaccaggtaaccccagtggtcggcattatcccgcccgatctgccgtatcgcgccagtgaagatgaagtcagcgcggtgtttgaaatgccgctcgcccaggcattacatctgggtcgttatcaccctttagatatctaccgccgtggtgatagtcatcgggtatggctgtcctggtacgaacagtattttgtatggggaatgaccgcaggcataattcgtgagctggcgctgcaaattggtgtgaaaccctgactatacttatctttacatctacaaaacactacttgagacaatcatcgcaatattagttaaatcgcggtttttgattagtttaattcatgtgaatagttaagccagtcgccgcgttccctcttacactatgcgctgttattagttcgttactggaagtccagtcaccttgtcaggagtattatcgtgattagtctattcgacatgtttaaggtggggattggtcccagttcttcccataccgtagggcctatgaaggcaggtaaacagttcgtcgatgatctggtcgaaaaaggcttactggatagcgttactcgcgttgccgtggacgtttatggtagtctgagcctgacgggtaaaggccaccacaccgatatcgccattattatgggtcttgcaggtaacgaacctgccaccgtggatatcgacagtattcccggttttattcgcgacgtagaagagcgcgaacgtctgctgctggcacagggacggcatgaagtggatttcccgcgcgacaacgggatgcgttttcataacggcaacctgccgctgcatgaaaacggtatgcaaatccacgcctataacggcgatgaagtcgtctacagcaaaacttattattccatcggcggcggttttatcgtcgatgaagaacactttggtcaggatgctgccaacgaagtaagcgtgccgtatccgttcaaatctgccaccgaactgctcgcgtactgtaatgaaaccggctatagcctgtctggtctcgctatgcagaacgaactggcgctgcacagcaagaaagagatcgacgagtatttcgcgcatgtctggcaaaccatgcaggcatgtatcgatcgcgggatgaacaccgaaggtgtactgccaggcccgctgcgcgtgccacgtcgtgcgtctgccctgcgccggatgctggtttccagcgataaactgtctaacgatccgatgaatgtcattgactgggtaaacatgtttgcgctggcagttaacgaagaaaacgccgccggtggtcgtgtggtaactgcgccaaccaacggtgcctgcggtatcgttccggcagtgctggcttactatgaccactttattgaaagcgtcagcccggacatctatacccgttactttatggcagcgggcgcgattggtgcattgtataaaatgaacgcctctatttccggtgcggaagttggttgccagggcgaagtgggtgttgcctgtagtatggctgctgcgggtcttgcagaactgctgggcggtagcccggaacaggtttgcgtggcggcggaaattggcatggaacacaaccttggtttaacctgcgacccggttgcagggcaggttcaggtgccgtgcattgagcgtaatgccattgcctctgtgaaggcgattaacgccgcgcggatggctctgcgccgcaccagtgcaccgcgcgtcagcctggataaggtcatcgaaacgatgtacgaaaccggtaaggatatgaacgccaaataccgcgaaaccagtcgcggtggtctggcaatcaaagtccagtgtgactaatacttcttactcgcccatctgcaacggatgggcgaatttatacccgctttctcgtctgctgtaatattccccactacacttccactgttgcgtcaggcgtttgtcgccatacgcttacagggtggcccgcatgcaaaaagcacaacggatcattaaaacctatcgtcgtaatcgaatgattgtttgtacgatttgcgcactcgttacgctcgctagcaccctgagcgtgcgatttattagtcagcgtaacttaaatcaacaacgggtagtacaattcgccaatcacgctgtagaggaattagataaagtactgcttcccctacaggcaggtagcgaagtcttgcttccgctgattggtctgccctgctctgtcgcccatttgccattacgtaaacaggcggcaaaactccaaactgtgcgatccattggcctggtgcaagacggcacactttattgctccagcatttttggttatcgcaatgtgcccgtcgtggacattctggctgaacttcctgcaccgcaaccacttttacgcctgacgatcgaccgtgccctgattaaaggcagtccggttttgattcaatggacgcctgcagcgggcagtagcaatgctggggtcatggagatgattaacatcgacttactgacggcaatgctgcttgagccacaactgccgcaaatcagtagcgccagcctgacggtggacaaacggcatttgctctatggtaatgggctggtagattcccttccgcaacctgaagacaatgaaaactatcaggtttctagccaacgctttccttttaccattaacgttaatggtccgggggctacggcgctggcatggcactatcttccaacacaattaccgctggcggtgctgctaagtttactggtgggctacatcgcctggctggcgaccgcttaccgaatgagcttttcccgcgaaatcaatctgggcctggcgcaacatgagttcgaattgttctgtcagcctttgcttaatgcgcgcagccagcaatgtattggtgtagagattttgctgcgctggaacaatccgcgtcagggctggattagtccggatgtgtttattcctatcgcggaagaacatcatttaattgtgccactgacccgctatgtgatggcagaaaccattcgtcagcgccatgttttcccgatgagtagtcagtttcatgttggcattaacgtcgcacccagccattttcgccgtggtgtgctgataaaagatctcaatcagtactggtttagcgctcacccgattcagcaactgatcctcgaaatcaccgaacgcgatgccttactggatgttgattatcggattgcccgcgagctgcatcgtaaaaacgtcaaactggcgattgatgacttcggcaccggcaacagcagcttttcctggcttgaaacattacgtcctgacgtgctgaaaattgataagagttttaccgcagctataggttctgacgcggttaacagcacggtgaccgatatcatcatcgcgctggggcaaagactgaatattgaactggtggcggagggcgtggaaacgcaagaacaggcgaagtatttgcgccgtcatggcgtgcatattttgcaagggtatttgtacgcacagccgatgccgctacgtgattttcccaaatggctggcgggcagccaaccgccgcccgcccggcataatggacatatcacgcccattatgccgttacgttaacgcttactcatcttcatcgtgcgccggttgctctttaacaatgcgaaccagatcaacacgataatcattggcttcaatgatggtgatatgcagtggccctacatcaatcacatcgcccacacggggaatgtgaccatttgcgctgatcacgaggcccgcgaccgtcgcgatatcatcgtcatcggcaaggtgctcaacatcaagcgcctgctgcaaggcatgcaaatctgtaccgccttttaccagccagccgtcaccatcagtaatgatttccggcgtttcgtcagcgtccgggaattcacccgcaatggcttccagcacatccagcggcgtgaccagaccttgtaccacaccaaactcgttggtcacgataacaaagctcccgcgagcacgacgcagcacgcccaacaggttgatcggatcgagggtttccgggacgataatcgccggagacgcgctagcaatcgccgccacatcaacgccctcttccagcgccaccagcagttctttagcacgtacaataccgatgatttcatccagttcaccgcgacataccgggaacagactgtgcggactagagagcagttgctcgcggatttcatcgaccccgagattagcgtcaacccagcttatttcaccgcgcggcgtcatgatcccgcgcagagaacggctcgccagcgtcagtacgccgttaatcatgtaacgttcttcttcggcaaatgcaccttccgggatcggcatcggcatcgggttatcggcatcgtgctgaacattggcctgacgtttcccgcccatcaaacgcaggatggcatcggcagtacgcgctcgcagcggcaaagtgctctggtggcgaataaagttgcgacgcgcaatctggttaaacacttcgatgatgatgctgaagccaatcgcggcatacaggtagcctttcggaatgtggaaaccgaaaccttctgccaccagactcagaccaatcattaacaggaagctcagacagagcaccaccaccgtggggtgctggttaacgaatcgcgtcagcggtttggatgccagcaacataaccgccatcgcaatcactaccgccgccatcatcaccggcagatggttaaccatccctactgcagtaattaccgcatccaagctgaagacggcgtcaaggatgacaatctgtgtgacgaccacccagaaactggcgtagcctttaccgtggccggaatcatgatcgcggttttccagccgttcatgcagttcggttgttgctttgaacagcaagaatatccccccgaacaacataatcaggtcgcgtccggagaaggagaaatccatgacggtaaatagcggtttggtcagcgtgaccatccaactaatcaggctcagcagccccagacgcataatcagcgccagacttaaccccagcaaacgcgctttatcgcgttgttttggcggcagtttgtcagcaagaatggcgatgaagaccaggttatcgatacccagcacaatttcgagaacaacaagcgtgagtagccccgcccaaatactggggtccattaagaattccatgacaagctcctgcttaaggaatagctattcgacgccagaaataatgcaggcgtaacgacaaaatgcaaacgaaaggtgcggcatagagtgccagaaaggcaggcgttaaaaggcctgatgctgaaatgacgtcggtgacgatccatactgcgggctactgccctatactccatggttgttaaacgggagttaaacatatcagagacgcctctgatttggcaaagatttaccttcctttgcaaacgaatgtgacaaggatattttacctttcgaaatttctgctaatcgaaagttaaattacggatcttcatcacataaaataattttttcgatatctaaaataaatcgcgaaacgcaggggtttttggttgtagcccttatctgaatcgattcgattgtggacgacgattcaaaaatacatctggcacgttgaggtgttaacgataataaaggaggtagcaagtgaccattgctattgttataggcacacatggttgggctgcagagcagttgcttaaaacggcagaaatgctgttaggcgagcaggaaaacgtcggctggatcgatttcgttccaggtgaaaatgccgaaacgctgattgaaaagtacaacgctcagttggcaaaactcgacaccactaaaggcgtgctgtttctcgttgatacatggggaggcagcccgttcaatgctgccagccgcattgtcgtcgacaaagagcattatgaagtcattgcaggcgttaacattccaatgctcgtggaaacgttaatggcccgtgatgatgacccaagctttgatgaactggtggcactggcagtagaaacaggccgtgaaggcgtgaaagcactgaaagccaaaccggttgaaaaagccgcgccagcacccgctgccgcagcaccaaaagcggctccaactccggcaaaaccaatggggccaaacgactacatggttattggccttgcgcgtatcgacgaccgtctgattcacggtcaggtcgccacccgctggaccaaagaaaccaatgtctcccgtattattgttgttagtgatgaagtggctgcggataccgttcgtaagacactgctcacccaggttgcacctccgggcgtaacagcacacgtagttgatgttgccaaaatgattcgcgtctacaacaacccgaaatatgctggcgaacgcgtaatgctgttatttaccaacccaacagatgtagagcgtctcgttgaaggcggcgtgaaaatcacctctgttaacgtcggtggtatggcattccgtcagggtaaaacccaggtgaataacgcggttagcgttgatgaaaaagatatcgaggcgttcaagaaactgaatgcgcgcggtattgagctggaagtccgtaaggtttccaccgatccgaaactgaaaatgatggatctgatcagcaaaatcgataagtaacgtattgtgttgattatcactcagttttcacacttaagtcttacgtaaacaggagaagtacaatggagattaccactcttcaaattgtgctggtatttatcgtagcctgtatcgcaggtatgggaagtatcctcgatgaatttcagtttcaccgtccgctaatcgcgtgtaccctggtgggtatcgttcttggggatatgaaaaccggtattattatcggtggtacgctggaaatgatcgcgctgggctggatgaacatcggtgctgcagttgcgcctgacgccgctctggcttctatcatttctaccattctggttatcgcaggtcatcagagcattggtgcaggtatcgcactggcaatccctctggccgctgcgggccaggtactgaccatcatcgttcgtactattaccgttgctttccagcacgctgcggataaggctgctgataacggcaacctgacagcgatttcctggatccacgtttcttctctgttcctgcaagcaatgcgtgtggctattccggccgtcatcgttgcgctgtctgttggtaccagcgaagtacagaacatgctgaatgcgattccggaagtggtgaccaatggtctgaatatcgccggtggcatgatcgtggtggttggttatgcgatggttatcaacatgatgcgtgctggctacctgatgccgttcttctacctcggcttcgtaaccgcagcattcaccaactttaacctggttgctctgggtgtgattggtactgttatggcagtgctctacatccaacttagcccgaaatacaaccgcgtagccggtgcgcctgctcaggcagctggtaacaacgatctcgataacgaactggactaacaggtgagcgaaatggttgatacaactcaaactaccaccgagaaaaaactcactcaaagtgatattcgtggcgtcttcctgcgttctaacctcttccagggtagttggaacttcgaacgtatgcaggcactgggtttctgcttctctatggtaccggcaattcgtcgcctctaccctgagaacaacgaagctcgtaaacaagctattcgccgtcacctggagttctttaacacccagccgttcgtggctgcgccgattctcggcgtaaccctggcgctggaagaacagcgtgctaatggcgcagagatcgacgacggtgctatcaacggtatcaaagtcggtttgatggggccactggctggtgtaggcgacccgatcttctggggaaccgtacgtccggtatttgcagcactgggtgccggtatcgcgatgagcggcagcctgttaggtccgctgctgttcttcatcctgtttaacctggtgcgtctggcaacccgttactacggcgtagcgtatggttactccaaaggtatcgatatcgttaaagatatgggtggtggcttcctgcaaaaactgacggaaggggcgtctatcctcggcctgtttgtcatgggggcattggttaacaagtggacacatgtcaacatcccgctggttgtctctcgcattactgaccagacgggcaaagaacacgttactactgtccagactattctggaccagttaatgccaggcctggtaccactgctgctgacctttgcttgtatgtggctactgcgcaaaaaagttaacccgctgtggatcatcgttggcttcttcgtcatcggtatcgctggttacgcttgcggcctgctgggactgtaagactgttgtacactaccggggccttttggccccgtttttttatctggaggattaatgacaatcacggacctggtactgattcttttcatcgccgcactcctggccttcgcgatctacgatcagttcatcatgccccgccgtaacggccccaccctgctggcaattcctttgctccggcgtggtcgcatcgatagcgttatcttcgtcggattgattgtcattcttatctataacaacgtcacgaatcatggtgcgttaataacgacatggttattaagcgcactggctctgatgggtttttatatattctggatccgcgttccgaagatcatctttaaacaaaaaggttttttcttcgccaatgtctggattgaatatagccgaatcaaagcgatgaacttgagcgaagatggcgtgttggtgatgcaattagaacagcgtcggctgttaatccgcgttcgaaatatcgacgatctggaaaaaatttataagcttctcgttagtactcaataagttatgaatttagccaaagctatgtttagtgtatttttaataatcagacatagcttaggctatattacctcttcccttatttgttatttattttaacgtttcattgatatataaatccaaatgaaaatcgttatcaataaagcaatgaaataatatattccaacagttgttttatattctcaaaatatgttaaggttgcgccctcatttggggagtagccgatttccagattccggaaatgtacgtgtcaacatactcgttgcaaaacgtggcacgtacggactgaatactttcagtcaggcgagaccatatgcacatcaatcgctatgcctgcatgaacgcgaaaaccatcacggcttgttgttcatgtatgcatgtttgctgggggcgatgatgtgttttatggataccccggtcaggacattgtcatgaatatcactgctactgttcttcttgcgtttggtatgagcatggatgcatttgctgcaagtatcggtaaaggtgccaccctccataaaccgaaattttctgaagcattgcgaaccggccttatttttggtgccgtcgaaaccctgacgccgctgatcggctggggaatgggcatgttagccagccggtttgtccttgaatggaaccactggattgcgtttgtgctgctgatattcctcggcgggcgaatgattattgagggttttcgtggcgcagatgatgaagatgaagagccgcgccgtcgacacggtttctggctactggtaaccaccgcgattgccaccagcctggatgccatggctgtgggtgttggtcttgctttcctgcaggtcaacattatcgcgaccgcattggccattggttgtgcaaccttgattatgagtacattagggatgatggttggtcgctttatcggcagtattattgggaaaaaagcggaaattctcggcgggctggtgctgatcggcatcggcgtccagatcctctggacgcacttccacggttaataagaacgctgccagaggtgaatattaaagtccgtctggcagtcgaacacttcttttgctgccagtgtttgccagacttctggcttcgcacgccaggcaaacggcgtcatctgcaataatgcgacggcttcatcaccgcgaagacgcatcggataacacaactccgcactctgctgtaatgtaaaaccttccagttgttctgcatgaggtgcatgaagatgtacttcattgtaaatcagccccttcagctccatcaaatgtcgcggtcccggcgtggcagtaatgacccagccgccgggcttcactactcgtgctaattcttctgctttacacggcgcgtaaatacgtattatggcgtccatactggtatcggaaaacggcaaacggtggctggaagcgacacaaaaagtgacctgcggatagcgtttcgccgccgcttttatcgctaccttgctaacatccagaccaaacgtggtgatttcgggcaacgcatcggcaaatgcgtgtgtgtaatacccttcaccacagccaatatccagcaccgccgtggccttatcatcaagccgttccctcagttgggcgacaattgcatcacgcagcggctgataatgtccggcatctaagaatgcgcggcgtgcttgcatcatttccgcgctgtcgcccggatcacgagaccgtttatgctgaacgggcagcagattgacatacccttctttcgccatatcaaactgatgtcgctggggacagatatagctgtttttttcacggctaagaggctgatggcaaagtggacaggaaaaagacatgacaactccggcaggatactaaaggccgcaagtgtaacgcgaatcacgcggcgggcaaatatccgaacgccaggagcgaagataaagcatagtaaaaagcctcgcattcgacgaggctttatagcgagattgaagcgtattcacacttcagatcagtggattcgatcagatagctgttacgttaacagctgccggacctttctggccgtcctgaatttcgaactcaacgttctgaccttcagccagagttttgaagccattaccctggatagcggagaagtgtacgaacacatctttgctgccatcagccggagtaatgaagccaaaacctttagactcgttgaaccacttaacctgacctttaatctttgccatttgaaaaattccttagattgttttcttcgcccgcaggcataacatagataaaacactcacattactgcaactggcaccaatataaggctcggcagagaagcggtattcaacgtcaacgtgtttactcaggacttctttactgaaaatgccacacataaacagaactgtacctcgtttaacccgaaatctgttatcacatacaacgttaattatggcaagccatttttaaacatgtctcgatcagacgcacaaatctcgatacgtcttccactttttttgcacacttatgcaacggaatacgcgccgatatatcattgtgcttaaccttgccagttcaggcagatacttaaactggcgtattttctaacatagttcaataagttcagttgttccaggccagtgggagaagttattacatagtgcgtgcaatatcacattttttgctatgcaatgaataaaaagttatatcactttttctcataaaacagtcagttaacggctattaattaccctaaagagaagtcaatccccaaagggattgtaaatttaaaataagaaaaattgatgaatgagcaaaaaaatcaagagagaaacgtttcgctaataaataataccacgcttaatcacaaatccgatgtaaacatcctaataaattaatggggtaaatatctttttctgatatcccgttacgcaaataaataatatgataattatttgaagtcagaccagagttttaatttgaagcagttgcaccatgacagtgcgtataatcaggatgaattgagtaacccttcaacgacggggttactcaagattgaggaaggattatcgttcggcgaccagacgaataatatcttcgtcttcaacgcttttttgactctcaacggtctttttatctgctttctctggttcgtttgcttcgcacaaacgacgtaacagtgcattttgacgtttttgctgatccagcaacgcctcaagcagttcaatctgttcgttagtccgactactggcacgattgataaaaaaccacaagatgagcccgataagaagaaccaccacgcttacaaccaaagacgcaatgttcatcacgccactatttacaacttcgttcatttcaccacctctgagtagaggcgctattctaccactgctggagaggaagaaaatctagtgctgaaaaaatgatatcaccacgggataaactggttaatggcacaaattccgctgaaaaattgtacatcctgatcgcacatcatgttgaatacctgcgcccaaagcagcaagcaagccaacaccacgacaaccagaacgacccatcgaaactttttcactccaatctccgtttcacctaccttatgtcattaaactagcatgcgttagttaaacagcgcctaactatgtcgatattcgtgctttttcggaatgagtcgcttgcttcagcgcatattgccgctacgattaagcgaacataaaaagagaagaggttgtaatgcgattcatcattcgcacagttatgctgatagcactggtatggataggattattactcagcggatatggcgttttgattggaagcaaagagaatgccgcaggattaggtttgcaatgtacctatctgactgccagaggcaccagcacggtacaatacttgcacactaaaagtggtttttttggggataacagattgcccgctgttacgcaaaagcaatatcgtggtcgataatggttaagggcaataaataaccagattctcactcctgagtaaaatactcttatagcaagcgcgtttaatataacgccaccttcaactttatttttctcatgctaaataaagaacctgtctgtttgatattccgacaggttcttactctcatcagaacggatagtcgtgataacccatttgggcagaaattttgcgcgctgcggtatgcaacattgcgacatattcctgtaaacgctcttcagagaaacgcaacgtcgggaaggagatgctcaaaccggcaatgaccacgccaaagcgatcaaataccggtaccgcaatgcatcgcagcccttcttcctgctcttcattatcttcgccatacccctgctcgcgcacctggtccagaacgggtaataacgcttctgtactggtgatggtccgctcggtactgcgtttatactccacgccctcaagaatttgcttcacttcatcgcgatcgcgccatgccagcagtaccttaccaatcgcggtgctgtacagcggattacgacgcccaatccgactatacatgcgcaaattgtacatagagtcaattttgtgaatgtaaacaatactgtcttcgtccagtgcgccgaggtggatagtttctttggtcaggcgggagagctcacgcatctggatatctgcgctacgaattaaatcgacgttttgtaacgcgcgagcgcccagttcaaacaatttcagggtcagggaatatttctcgctctccccttcctgcgccacataacctaaggttttcatggtctgtaaaaagcgataaacggtgcttttactcatcatgacgcgctggctcagctcggttatccctatttcgcgctcttcacccagcgcctgcaaaatgccaaaaacttttagcacggaagatacagaatcaggctgtttatccagatctgcgttagccatttatcacctcattgcgagtgttttataaaaatcagaactgttttttattataatttcgcaccagggtggtcgcaatccatcttttgccggttagttacaattctgcgacatccaccgtgaatatcagtgctagaatcatacccctgttgattattcaccaaagatataaaattcctatgccaaaagttcaggccgacggcctgccattgccccagcgatacggtgcgatattaaccattgtgattggtattagcatggccgtccttgacggcgcaatcgccaacgtcgccctgccaacaatcgccacggaccttcatgccacgccagccagttccatctgggtagtgaacgcctatcaaatcgccattgtcatctccctgctcagctttagctttctgggcgatatgtttggctatcgacgtatttataaatgcggtctggtcgtttttctgttgtctagtctgttctgcgccctttctgatagcctgcaaatgctcacccttgcgcgtgtcatacaaggtttcggcggtgcagcgttgatgagcgttaataccgcacttatccgcctgatctatccacaacgttttctgggtagagggatgggcataaacagctttattgttgccgtctcttctgctgccgggccgacaattgctgcagcaatcctctccatcgcatcctggaaatggttatttttaatcaacgtaccgttaggtattatcgccctgcttctggcgatgcgttttctgccacccaatggttctcgcgccagtaaaccccgtttcgacctgcccagcgccgtgatgaacgcgttaaccttcggcctgcttatcactgcgttgagtggtttcgctcaggggcaaagcctgacgttaattgctgcggaactggtggtaatggttgttgttggtattttctttattcgccgccagctttctcttcccgtaccgctgctaccggtggatttactgcgtatcccgctgtttagtctttctatttgcacatctgtttgctctttctgcgcacaaatgctggcaatggtttccctgcccttttacctgcaaaccgtgctcgggcgtagtgaagtcgaaacaggtttacttctgacaccgtggccgttagcaacgatggtgatggctccgctggcaggctatttgattgaacgcgtacatgcaggattgctgggggctttagggttgttcatcatggctgcggggcttttttccctggttctgctgcccgcgagtcctgcggatatcaatattatctggccgatgatcttatgtggtgctggatttggcttattccagagtcccaataaccacaccattattacctccgcgcctcgcgaacgtagcggtggagccagtggcatgttaggaacggctcgtctactgggtcagagtagcggcgcggcgctggtggcgctgatgctaaatcagtttggagataatggtacacacgtcagcctgatggctgcggctattctggcagtgattgctgcctgtgtcagtggtttacgtatcactcagccacgatccagggcataaaaaaagcgcgtcgatcaggacgcgctttttagtatttacttcatattacttcaggtattcacccgtacgcagagcttcaattcgtttatccagcggcgggtgggtcatgaacaactcactgaggcttttgctcttaccgttaatgcagagagccatcatgctggttgcttcttgcggttcatagctggttttcaggcgctgcagcgcggcaatcattttctcgcgaccaaccagttttgcgctaccggcatcagcatggaattcacgatgacggctgaaccacatggtgataatgctcgccagaataccaaacaccagttccagaaccgttgcaaccgcaaagtagatcagcgggttgccgttgctctcttcaccttcatcacgatttccgcccataaaacccgcggcaagctgcgccagaatacgggaaataaagataacgaaggtgttcaccacgccctgaatcagcgtcatggtgaccatatcaccattggcgatgtggctgatttcgtgagcaattaccgcctcggcttcatccgggctcatgttctgcagcaaaccggtgctgacagcaaccagagaggcatcacggcgcgcaccggttgcaaaagcgttgatgtccggcgcatggtagatagccacttgcggcatagcgatccccgcctgacgagcctgggttgctacagtattgaccagccaacgttccctttcgttacgcggttgctcgatcacttccccgccaacagatcgtaatgccatccatttggacatcagaaggctaacgaaggaaccaccaaaaccgaacagcaaggccatgatcatcagcccctgaacgctgctgctctgtatccctgtcaggctcagtaccagcccgaaaacgaccattacggccaggttcgttagcaggaagagcgcgattcgcatcataattttctttttacctcagtttaacaaaacgcaatatgcgatacccacatcgtatgggttacgcgactattttcaagtctggatagtgcgtaagtcaccagaaagacacaactttacattttgtagcatctgatttacggcatcttgtcgctgttaaaaaatcaggcacaatttcttgtgcctgattgatattacttgacgggagcgggttgttccgcgggtctggctttttcaagcttcgccagatcgagtgcgatattcaccgtctcatccagataaggatccggctcctggtaatctttcggtagatcatccagtttcttcaactccggtttaccttcgcgtttaaagcgttcgttcaaacgcgccagacgcgtcgcatcatcttcattattctctttctcacgcacagcgtaattcagagaaacgatattgcgcttgtccttcatagcgttgaagcgcgcgatatccttcatgatgttctggaactcaggatctttcgcgatacgcgcattatgttccttcagcagctccggttcaaaggccgttaaatctccacttttcacataagtcgcggcatcaatgctatcccacggcagcgcgttatcttcgaatttctcacccgtttccgtttcttcattacccgtcggcatgatgatgtctggcgttacgcctttacgttgcgtactgccgccgttaacgcgatagaatttctggatcgtgtactgcacagaacccagcgctggccattcaggacgtaacatctgatcgtaaatacggttcaaactacggtattgctgaacggtgcctttaccaaacgtcggttcacccacaaccagcgcacgaccgtaatcctgcattgccgcggcaaagatttcactagcgctagcactgaagcggtcaaccagcaccaccagcgggcctttatagaaaacctgtccgtcggtatcgctatcttcacgaaccttgccgttgttatcgcggacctgaacaatgggacccgcaggaataaacagaccggagaggcttacggcttcagttaacgccccaccgccattgctacgcaggtcgatgatgacgctgctgacattctgtttttccagtttctgcagttgcactttgacatcgtctgtcaaacccacatagaagcccggaatatccagcacgccgactttctctttaccgacggtcttcacgctcattttaaccgcgcggtcttcgagacgaatacgttcacgggtcaacgttacagtacgggtcttggtccctttaccagcaggtaaaatttccagacgaactttactgcccttcggccctttaattaaggcaaccacatcatcaagacgccagccaatcacgtcaaccatcggcttgcctgtttgaccaacaccgacaattttgtcaccaacgctgatagctttactcttcgctgccggaccacctgccaccatgctattgataacggtgtagtcatcatccatttgcagcactgcgccaataccttccaggctcaaactcatttcagtgttgaactgttcggtattacgcggggaaagatagttggtatgcgggtcgatttcacgcgcaaacgccgtcattgccaggctgaaaacatcttcgctgttggtttgcgccagacgacgaatggcaaatttgtagcggcgagtcagggtttcacgaatttctttatccgtttttcctgtcagcttcaggcttaactcgtcgaatttgactttactgtcccacagcgcgttcaactcagcctcgtttttcggccagggcgctttgctgcggtcaaggttataagtgtcgttgccggtgaaatccatcggcttttccagtacgctcaaagcgtactggtaacgctcaaaacggcgcttttgcgccagattgtagagatcgtagaaaacgtcgagtttgccactacgcagttcatcgcctaactcggttttctttttcgcgaactgttcaacatcgcttgccagcagcacgttgtggctgtaatcgagcagattcaggtagcggtcaaagattttggcgctaaatgcctgatcgaggtcgaactggcgataatgagaacgggtgaagcggctcgttacgcgctcacttaccgtcgcatgctgcgtctcttcctttaataccggaatttgatcagcacgcgtgatatcttctacagcgaaggtctggcctgctattgcaagcaggccagctaacgcggtaagcctaaaaaacatgttcatgcctggcccggcctccgtttcagaacaccaggtgttctgcgcgcacaatcaaagacataccgctattcagctggacgcggacgccgtctttggtgatttctaatacggtggcatccatcgcgttttgacccgctttcaccttcagggcttgtccgacagtcagagcactaatgtcagaaaccggggtgtgctgttcttcgcgaggtgcttttactgtttttggcgctttctctaccggcttttgcgcacgaggtttacgttcagcgccttctttgcggcgtggcgtagtcggacgtggcttgcgttcgcggcgcggtgcgtcttctttctcaccagcagttgcggcagcttcgcgttttttcgcttgctgttcagcacgctgtgcctgaacacgcgctttcgcttcttcaagctgcttgcgagcatgctctacatgttgctcgtccagctcaccgcatgggttgccgtcaagatcgacacgcgttgcgccgggtttaacaccgtaaagataacgccagctgctagtgtagagacgtaaagcggatcgcaattgcgttttgctcaggttcatttccccagcaacacgatcgaccaaatcctgaaaaataccgattttcagcggacgcgcttcaccttccgcactgaaacagtggggaaaacgttcggccagaaacgcgattacttctttactgctattcaacttaggttgattttccatgaaatttcctgattacaacggacgtagccaacaagcgcaggcatgaacaggcgtcattataatgacgctatcagtaaatgctacgttatccgttgattatcctgcgacgctcgcaaagaattttttgtaatccgtcgttgcaagcactttttcaagctgtgccacaagctgacgtaagccttgctcgtcctcgtctgtaaagcgaccgaagacggtactatcgatgtcgagaacaccaataatctgatttttcaccaccagcggcagaacaatttcagaattactcgccgcatcacaggcaatatgcccgtcaaacacatgaacatcctcgatacgctgcacttgattgcgggcaaccgcagtgccgcacacgccgcgcccgacgggtatccggacacaggcaattttgccctgaaatggtccgagtaccagtgtatcgtcctcaagcaaataaaaacctgcccagtttatgtcagtgagacgctcatataacaacgcactggtgttcgcaagcgttgccagaaaactggtttctcccgccatcagcgcgttaaagtcgcgatttaaatccgcgtaaaattctgttttgttcattatataatcacttggttgtcttacctggatctgccagcctattaaaataagcattaaatgcgttaatgctcaagatcattcccatcatgggttaagattaatgttaattcttattacatttggcacgtcatggctcttaacacaccacaaattacgccgacaaaaaagataacagtgagggcaatcggcgaggaactgccgcgtggtgattaccaacgttgcccgcaatgtgacatgctgtttagcctgcccgagataaattctcatcaaagtgcctattgtccgcgctgtcaggcaaaaattcgtgacgggcgcgactggagcctaacgcgcctggcggcaatggccttcaccatgctgttgcttatgccgtttgcctggggcgaaccgctgttgcatatctggctgttaggcattcgtattgacgccaacgttatgcaaggcatctggcaaatgaccaaacagggcgatgcgataacggggagcatggtctttttctgcgttattggtgccccgctcattctggtgacctccatagcttatttatggtttggtaaccgactgggaatgaatttacgtccggtactgctgatgcttgagcgacttaaagagtgggtaatgctcgatatctacctggtcggcattggcgttgcttctataaaggtacaggattatgcccatatccaggctggtgtcggcttgttctcttttgtggcgttggtgattttaacgacggtgacgttgagtcatcttaatgtcgaagaactgtgggagcgattttatccgcagcgccccgctacgcgtagggacgagaaacttcgtgtctgtcttgggtgccattttaccggctatccagatcagcgtggtcgctgcccgcgttgccatatcccgctacgcctgcgtcgccgtcatagtctgcaaaaatgctgggcggcgctgttagcgagtatcgttttattgttacctgccaacctgttgcctatttctatcatttatctgaacggaggacggcaggaagatacaattctttccggaattatgagcctggcaagtagcaacattgcggttgcaggaatcgtgtttatcgccagtattctggtaccgtttactaaagtgatcgtcatgttcactttactgttgagcattcattttaaatgccagcaaggtttacgcacacgcattctgttactgcggatggtgacctggattggtcgctggagcatgctcgacctgtttgtcatatctttaaccatgagcctgattaatcgcgatcagatcctcgcttttactatgggaccggctgcgttttatttcggcgcagcggtaattttgactattcttgctgtggaatggctggacagccgcttactttgggatgcacatgagagtggaaacgcccgcttcgacgactgaataaccgcttactttgggatgcacatgagtcaggaaacgcccgctagcacgactgaagcgcagattaaaaataaacgccgtatcagtcctttctggctgctgccgttcatcgcgctaatgattgccagttggctgatttgggacagttatcaggaccggggtaataccgtcaccatcgactttatgagcgcggatggtattgttccaggccgtacgcctgttcgttatcagggcgttgaagtcggaacagtgcaggatatcagcctcagcgacgatcttcgtaagattgaagtcaaggtcagcatcaagtccgatatgaaagatgcgctgcgcgaagagactcagttctggctggtgacgccaaaagcaagcttggcaggtgtctccgggctggacgccctcgtcggtgggaactatatcggcatgatgccgggtaaaggtaaagagcaggatcactttgtcgcactcgatacccaaccgaaatatcggctggacaatggcgatctgatgatccacctgcaagcccccgatctcggtagcctgaacagcggtagtttggtctatttccgcaagatcccggtgggaaaagtctacgactatgccatcaatcccaacaagcaaggcgtggtgattgatgtcctgatcgagcggcgttttaccgatctggtgaaaaaaggtagccgtttctggaacgtttccggcgttgatgccaacgtcagtatcagtggcgcgaaggtgaaactggaaagcctggcggcactggttaacggtgcgattgccttcgatagtccagaagagagcaaacctgccgaggcggaagatacctttggtctgtatgaagatctggcccacagccagcgtggcgtaataataaaactggaactgccgagtggggccggattaaccgccgacagcacgccgttaatgtatcaggggctggaagtcggacagctgactaaactggatttaaatcctggtggtaaagtcacaggggaaatgaccgttgatcccagcgtcgttaccctgcttcgtgaaaatacccgcatcgaattacgcaacccgaaattatcccttagcgatgctaatctcagcgccctgctgaccggcaaaaccttcgagctggtgcccggcgatggcgagccacgcaaagagttcgttgttgtgccaggcgaaaaagcactgctgcatgaacctgatgttctgacgctgaccctgaccgcgccggaaagttacggtattgatgcgggtcagccgctcattcttcacggcgtgcaggtaggccaggttatcgatcgtaaactcaccagcaaaggcgtcacctttaccgtcgccatcgagcctcagcatcgcgaactggtaaaaggcgatagcaaatttgtcgtcaacagccgtgtcgatgtgaaggtggggctggatggcgttgagtttctcggtgccagcgccagtgaatggatcaatggcgggatacgtattctgccgggcgataaaggtgagatgaaagccagctatccactgtatgccaatttggaaaaagcgctggagaacagccttagcgatttacccaccacaaccgtgagtttgagtgcagagacgctgccggatgtgcaggcaggaagcgtagtgctgtaccgtaaatttgaagttggtgaagtgattaccgtgcgtccgcgagctaacgcgtttgatatcgatctgcatattaagccggagtatcgcaaccttctgaccagcaatagcgtgttctgggcagaaggcggggcgaaagttcagctgaatggtagtggtctgaccgtacaggcatccccgctctccagagcattaaagggagccattagcttcgacaacctcagcggtgccagcgccagtcagcgtaaaggcgataagcgtattctgtatgcttccgaaacagcggcccgtgcggttggcgggcagattacgcttcacgctttcgatgccggaaaactggcggtcgggatgccaattcgctatctcggtattgatatcgggcaaatccagacgctggatctgattaccgcacgcaatgaagtacaggcaaaggcggtactttacccggaatatgtccagacctttgctcgcggtggtacgcgcttcagtgtggtcacaccgcaaattagcgcagctggcgttgagcatcttgatactatcctccagccgtatatcaacgtcgaaccaggccggggcaatcctcgccgcgactttgaattacaagaggccaccattactgatagccgttacctggatggcttaagcattattgttgaagcgccggaagccggtagcttaggcatcggtacgcctgtgctgttccgtggtctggaagtcggtacggttacaggaatgacgctggggacattgagtgatcgcgtgatgattgcgatgcgcatcagtaaacgctatcaacacctggtgcgtaacaattccgtcttctggttggcaagcggttacagtctggactttggtctgacgggcggcgtagtgaaaaccggcacctttaaccagtttatccgtggcggcatcgccttcgccacgcctccgggtacgccactggcaccgaaagcccaggaaggcaaacacttcctgttgcaggaaagtgaaccgaaagagtggcgtgaatggggaactgcgcttcccaaataatgcccactgctccggcgtgcctgcgccggagcgtttatgctaaactgcgcgcctgtttttttgccagtggtacatgctcgtggcccaacacaccgtttatttcccggacgcctttctgacacaaatgcgcgaagcgatgcctagcacgctcagttttgatgattttcttgccgcctgtcagcgcccgttgcgccgcagcattcgcgttaatacgctgaaaatctccgttgctgatttcctgcaattaaccgctccttatggctggacgcttacgccaattccgtggtgtgaagaaggtttctggattgaacgcgacaatgaagatgcattgccattgggtagtaccgccgagcatttaagtggcctgttttatattcaggaagccagtagtatgttgcctgttgccgccttgtttgctgacggtaatgcaccacagcgggtgatggatgtcgctgccgcgcctggctccaaaacgacgcaaatttccgcgcggatgaataacgaaggggcaatccttgccaatgagttttccgccagtcgggtaaaagtgttacatgccaatatcagccgctgtggtatcagtaatgttgcgctcacacattttgatggccgcgtgtttggtgcggcagtgccagaaatgttcgatgccattttgctggacgctccctgctctggcgaaggcgtggtgcgtaaagatcccgatgcgctaaaaaactggagtccagaaagcaatcaggaaatcgcagctacacaacgggagcttatcgacagcgcctttcatgcattacgtcctggtggtacgctggtttacagcacctgtaccttaaaccaggaagaaaacgaagccgtttgcctgtggctgaaagagacttaccccgacgcagtagagtttttaccacttggcgatctcttccctggtgcaaacaaagcgctgaccgaagaaggctttttgcatgttttcccacaaatttacgactgcgaaggcttcttcgttgctcgtctgcgtaaaactcaggcgattcccgccttacccgcccccaaatacaaagtcggtaattttccgttcagcccggtgaaagatcgcgaagctggacaaattcgtcaggcggctacaggtgttggcttaaactgggatgaaaacctgcgcctctggcagcgtgacaaagaactgtggttgttcccggtgggcattgaagccctgatcggtaaagtccgattttctcggttggggattaaacttgccgagacgcacaacaaaggttatcgctggcagcatgaagcggttattgctcttgccagtcccgataatatgaatgcattcgagctgacaccgcaggaagcggaggagtggtatcgcgggcgcgatgtttacccgcaagccgcgccagtggcggatgatgtattggttactttccagcatcaaccgattggtttagccaaacggattggtagccgattgaaaaacagctatccgcgtgaactggtgcgcgatgggaaactttttaccggtaacgcctgacagcgcacaaaaaaagcgcactttttgactggcacattcggctgcctcaactaggctgaaaaatggtgcgatcggactggtcgtaccacaatcggcagctaaatggagagcacgaagatgaaaaccagtgtgcgcataggcgcttttgaaatcgacgacggcgaattacacggtgaaagcccaggtgatcgaacgttaaccattccttgtaaatctgaccccgatttatgtatgcaactggatgcctgggatgctgaaaccagtatccctgccctgctaaatggcgaacactctgtcctttaccgtacccgttacgatcaacaatctgatgcctggattatgcgtcttgcctgatccaaaaagaacccgtcggcatggcgggttatttgtcctggttattcccccgttgtaaaatctctcctaaacttaacggtacggcaccacacttcggggatgaaatgttcgcgctggtactttttgtttgctacctggatggcggttgtgaagatattgttgtggatgtctacaacacggaacagcagtgtctttattctatgagcgatcaacggatccgccagggcggttgttttccgattgaggattttatagatggtttctggcgacctgcacaggagtacggtgatttttaattattgcaattgcacaagagtcagttcgcccccaaagacagcaccggtatcaatataatgcaggttgccaatatccacgcgatgtcgcaacggtgtatgaccaaaccagaaatgatcagcacctgtaattccctgccctttttggcgttcacctaatcggctgcggctccacaagacctgatgcaaatcaacgtccttttgccattcataaacatcatctggataatcggcatgagcaataatatgcttgccggtgcgactgtgtacttcaagaataaagggcaaatgctgacatttttccagcgccgttttcgcttgtttctgttgattatctgccagcgcaataaaccagtcgccgccattcatcaaccacaaagacatctgctgggatgccagcgcatccatcgccatctgttcatgattgcctcttaccgcacaaacccaatgttgttccagtaactgcagacaacgtaaactttgcggcccacgatcgataacgtctcccacactgataagtaaatctcgccacggatcaaaacgacaatgccataatttgcggcgcaactgctcaagacaaccgtgtatatcgccagaaagccagatatgtcgccattgatgacccgcaattctctgataaacgggcgcaggctgtttcatcaatattttcctcccgcgctaaagatcacataatcttaacaagaatgttaaaaaacgctggactcagacagtagagtgtgtgttatggttgactataaagtcagcgaaggaaatgcttctggcttttaacagataaaaagagaccgaacacgattcctgtattcggtccagggaaatggctcttgggagagagccgtgcgctaaaagttggcattaatgcaggcttagttgccttgccctttaagaatagatgacgacgccaggttttccagtttgcgtgcaaaatggtcaataaaaagcgtggtggtcatcagctgaaatgttaaaaaccgcccgttctggtgaaagaactgaggcggtttttttattggaaatcaaaaggctattttaggtaattaacagagtttttcagctcgttctataaacggtgccagactcattttttcgccgggattgttaggatcatcaatctgaatcacgctaatgggttgggcattggtcttcccactggcaacttccttttgtgcgatatcgtttaaaggatactgcacgagggtactcggattaataacatacaaagcattacccggtcggcaagtcagcatcacctcttcgcgattaaacgcccatttgtctttacccacttcaaaacgactgacggtaatcacctgcggtgcagccagcgccgctgcagaactggtgagtaacagaaacgccagaatactttttttcatcattttcgtaatccatcaaaaaggttcgagagtcgcaagcaggctgatgatcaccagcactaccgcacctatcgcccattcgagtttagtcatccacacaaaccagggtgccgcacgatcttcatcctgcctcatgcgcggtacaagaacataacgattagccagcgcaatgaccaccataatcatcaccaggatggctttgagcaataagagttggccccagtaagtcgtaagcgtggggggaaatccggtaatcaacaatgcattaagcacgccgcttgccagtacgccgatcaccgcaaaatgcccgcaccaggaaaaacgcatcagcgcctgaatagcctggtgtcgccaacggcctttgatgagttgcatacaccagagcaccggcagtaatcccccaaaccacgccgccgcacaaatcaggtgaatcgcgtgattagtctgatggattttcgctgttaccccttcattcagcgtcgcatgccccactcccgccagcagaataaattgcgcggtagtgagcataaacagcaaacgtggcatattccgcggttgcataagggcgacgatcaacgttacgagggcgagaacaatttgccataaccagatgccaccaaactgcgtttgcaaaacagcctgccaaatgtttgggctaaatacatctgtccatcccgttcccatcaacccgccctgaacggcgagcattgcagtggcactgatcaaactccagacggcagcgtgctgttgtaaacgcagaaaacgcttcgccagcaagcgacgaatcgtcaagggggccagccaggcaccgtacattgcgaagccaaaaaccagcatcaggctggtgaaatggataaatcgcagcgcgatccaggtaaacgccagcatgatttatttcacgctaaaggtgtagtgtcctttcgttttatgcccgtccacgctaacaacatgccagtcaacggtgtaggttccgggtttcaggctatcggccagtggaacaatcagttgcttttggtcctgctcatttcgcttcgccggtaatgttttaatattttcgttttttggccccgtgatttttgcaccactgaatcctgtttcaacaccttcgctgaagtttaaagtgattgcctgcggtgcagctgtcacttgcgcgtttgccgcaggatactgatgcgttaaatgcgcatgtgcccagacggaaggtgtcaccaagctagtggtcaggattgccagcgcgtagcgaagggagcgtgcagtactagccatattatctattcctttttgtaataacttttttacagagcataaccttgtctaatgtctgagtcgaggatcatcaattccggcttgccatcctggctcactcttagtaacttttgcccgcgaatgatgaggagattaagaatgctgaagaatctggctaaactggatcaaacagaaatggataaagtgaatgtcgatttggcggcggccggggtggcatttaaagaacgctacaatatgccggtgatcgctgaagcggttgaacgtgaacagcctgaacatttgcgcagctggtttcgcgagcggcttattgcccaccgtttggctagcgtcaatctgagtcgtttaccttacgagcccaaacttaaataaaacttatacagagttacactttcttacataacgcctgctaaattatgagtattttctaaaccgcactcataatttgcagtcattttgaaaaggaagtcattatgagcttctggaaagttgcagcagcgcaatatgagcctcgtaaaaccagtctcaccgaacaggtagctcatcatctggagtttgtgagggccgccgccaggcaacaatgtcagctgttagtttttccaagcctttctttactggggtgtgattatagccgacgtgcccttcctgccccacccgatctcagtctgttagacccgctttgttatgccgcaacgacctggcgaatgaccatcattgccggccttcccgttgaatataacgatcgctttattcgtggaattgcggtgttcgcaccgtggcgaaaaacgcctgggatctaccatcagagtcatggtgcatgtctgggccgtcgttccagaaccatcacggtggtcgatgaacaaccgcaaggtatggatatggacccgacctgtagtctgtttactacagggcaatgtctgggagaacccgacctgctggcgagcgcccgtcgcttacaattttttagtcatcagtacagcattgccgtgctgatggcaaatgcccgtggtaacagtgcactatgggatgaatatggtcgtctcatcgttcgcgccgatcgtggtagtttattgttagtcggtcagcgtagtagtcagggttggcaaggcgatatcattccattacgctaagctttttcggcctggagcatgccatgttgcgcattatcgatacagaaacctgcggtttgcagggagggatcgttgagattgcctctgttgatgtcattgacggaaaaatcgtcaaccccatgagccacctggtgcgccccgatcgtcctattagtccacaagcgatggcgattcatcgcatcaccgaagccatggtcgccgataaaccgtggattgaagatgtgatcccacactattacggtagtgaatggtatgtcgcgcataacgccagctttgaccgccgcgtactgcctgagatgcccggtgagtggatttgcactatgaaactggcccgtcgtttgtggcctgggatcaagtacagcaatatggcgttatataaaacacgcaagctcaatgtacagacgccgccgggcctgcatcatcaccgcgcgttgtatgactgttatatcaccgccgcgttgcttatcgatattatgaacacctccggctggacggcagaacagatggccgatatcaccggacgtccgagcttgatgacgaccttcacctttggcaaataccgtggcaaagcggtttccgacgttgccgaacgcgatccgggctatctgcgctggttatttaataacctggacagcatgagcccggagctgcgtttaacactgaaacattatctggaaaatacttaatccgcaggcgtagcgggtaatgttccctgcgccagcgcgaccagaaaagcatattccatcgctacgccttcgtagcttttaaagcgaccagatttaccgccatggccactgtccatgtcggtacagagcaataaaagatggtcatcggttttcagctcgcgcaatttagcgacccattttgccggttcccaatattgcacctgagaatcgtgcaaaccggtcgttaccagtaaatgcggataagcctgtgcggtgacgttgtcatacgggctgtagcttttcatgtactcgtaatattgcggatcctgcgggttaccccactcttcaaactcaccagtggtaagaggaatactttcatcaagcatcgttgttacaacatcaacaaacggtacctgggcgataacgccgtggaataattccgggcgttgattaattgcaacgcccatcaacatgccccccgcactcccgcccatcgcataacaaaggctaggagagccatagcccagttttaacaatgcatcgcaggcatcaagataatcattaaacgtatttttcttcttcagaaattttccgtcttcgtaccattgttgccccagctcaccaccgccgcgaacatggacaatggcgtagacaaagccacgatctaacaaactcaagcggctaaaactgaaatcggcatcaatacttgcgccgtaagaaccatagccatacaccagcaacgggttgtgtcctttgcgaaaatgtttgcgatggtagaccaagctaaccggaacttcgacgccatcacgggcgactatccacaggtgttcactgcggtaattcgccgcataaaaaccaggaacttccgtttgttttaatacacgacgctcaccggtatccatatccagttcaaacaaagtgtctggtgtagtcatggaagaataaccataacgcaatcgcgcggtttcaggttctggattgtaggcaatccaggtcacataggccggatcatcaaaggcaataccaatgacttcccgggtcttgcggttaatttggcgcaaactggttaacccgcgctgacgctcttcaaccaccagccagtcggtaaacagcgtaaacccttccagcatgatgttttcgcgtggcggaattaactcttcccactgttgctcatcacgcatacgggtacggtataagccaaagtttttgccgtggcggttggaacgcagataaaaacgatgctggtagtgatcaaggctgtattcgtgatctttgcggcgcggcagaaaaacaaacggctcggcatcggccatttccgcgtccagcaggcgaacttcactggtggtggcgctggccaaatgaatgactacatagtgcttgctggtcgttttatgcaggctgacgtaataggtatcgtctttttcttcgtagatcagtttatcttggcttgctggcgtaccgatggcgtgacgccagacctgataaggcagcagcgtcaccggatgcttgcgaacatagtagaaaatccaggagtcatttgcccagacaaagctgggttcaacgttatccagcagttccgggtaccagttaccagtttccagattacgaaaacgaatgccgtactggcgtcgggaaagaaaatcttctgccagcgccataatggtgttatcgggcgtaatcgccattccgcccatgctataaaactcactatgagctgcgcgcttattggcatcgagcaatgtttcccactcatcccactcttcactgaatgcgctttgacgctggtagatagcatattcacagcctggttcataaatatgccgatagcggtagccatttttgatgtagggcgcagaaacttctcgttgcggaatgcggtcgatgatttcctttaagatgcgatcctgcaaggcttgttgactggccatcacccgatgaccgtaactattttcttgttgcaggtagtccaggacttctggctgagaacgcgtatcgtcccgcagccagtagtaattatcgatgcgcgtatcgccatgaagcgtcatggcgtggggaatgcgggcggcttttggtagcatgttattgttctttctggttgaaacatcttataagggtggcaaaactcaccggggatgcaagcgaaacaggggagtcattgcttagatgatgacaggtaatggcgcggatatcgaatgttatgcagacagagaaaatcagcctgttcaaatggctgtgcgattctggatagcccgaaatagtcaacttcaggctatccagagagcggaattattccgccaaagtgcgtttttgctgttcgagatcgcgttcaatgccgtcacgaacatcctgggggattttcagcgcgtcacccagtgcattcaggtaactgcgttccataaaatggtcaatatcaatagccgcgcaactcaggaaatagatttccagcgcctcttcttcattgcggaccccggtagccaggcgttgtggatccagcggttgttcgattgcctgctcaatgagtacacgcccctgctcttccacgccggctccacgcaattgctggtcgattgccgcacgttctttggcatcaatatgaccatcacttttagcggcaaagaccagcgcaaggatcaaacgtgctgtacgctcatccagcggcgtactttgcgcgccaaactgcggttcgtcctgatgcgccgcgcgaattttatctttgtatttattccacagcaccgtacccgctaccgctccgccgccaaccagtaacgcgttggtgccatatttcgtaagaagtttacgtgcacttttatttgcgaccagcagcccagccagtccgcctaatgcgcctggcactaacagtttgaccaatccctgatccgcagagctggaggtagaagaactgctttgcccaagcagggattgcagttgatttaaccagttagccatatttgctcctcaataaccatttttagtgcctgtagcatagcggatgaggatgtcagaaaatgtatatcgagacaaaagatgcgcaaataagcggggcggtaggccgttattcaaagaaattcgcgccaggtaaggtatttactgtatatcaggtgataagggtattttaggtgaaagtagtttgtcgttttgagtggcattgtttgatgctgattgcccgatgcgacgctgttgcgtcttctcaggcctacgattgtggtgcgttctggggcggacaaggcactcgcgccgcatccgccaacagtcaatcgaattatcagaagccattaacgccgctgatattccgccattcccgctttgcagtccacgctgacctggtaatgaatatcggcacttttaccacgcacggttagcggtacactccatttatcatctttaccctgaatgtcctgcaaactgacccaagccacgggatcggcctgaccgacaattttttgatcatctgcccaacgcgccacgcgattttgttgataatcacgttttacgctcgcggcaattccggcagcatccagatcttcacactttgggaaagtgacgctcttgctggtttcattattggcagcgaaaacacttgcgcaggcagaaaccaacaacagccctaaaaacgcccctctttttttcatgtttttctccatagcacaatgattcaggagaaagcatggtacaaattgtcaggagcgcaagttgcttcaggccgcgtgactggcatcttcctcttcggattcagcaccgacgacctgtggggacggtaatttgccggttttcagaatggtgctcagcacatctttttgttctgccagccataggctaagggcttcacgttgctcgtcttccatttgcactggagaatttgtcagccaggtgtcaagcagatccgccgtatcaagcattttgtcataagcatcggcttcctttttgctggtaaagctcattttctcttcgccctcacgaatgactacgtatttaacttcaaccgccatttgcagcctctcataataactgtgattttatacagtatatttcttttcggttgagaaatcaacatcagcaataaagacacacgcaaacgttttcgtttatactgcgcgcggaattaatcaggggatattcgttatgacgttattaggcactgcgctgcgtccggcagcaactcgcgtgatgttattaggctccggtgaactgggtaaagaagtggcaatcgagtgtcagcgtctcggcgtagaggtgattgccgtcgatcgctatgccgacgcaccagccatgcatgtcgcgcatcgctcccatgtcattaatatgcttgatggtgatgcattacgccgtgtggttgaactggaaaaaccacattatatcgtgccggagatcgaagctattgccaccgatatgctgatccaacttgaagaggaaggactgaatgttgtcccctgcgctcgcgcaacgaaattaacgatgaatcgcgagggtatccgtcgcctggcggcagaagagctgcagctgcccacttccacttatcgttttgccgatagcgaaagccttttccgcgaggcggttgctgacattggctatccctgcattgtaaaaccggtgatgagctcttccggcaaggggcagacgtttattcgttctgcagagcaacttgctcaggcatggaagtacgctcagcaaggcggtcgcgccggagcgggccgcgtaattgttgaaggcgtcgttaagtttgacttcgaaattaccctgctaaccgtcagcgcggtggatggcgtccatttctgtgcaccagtaggtcatcgccaggaagatggcgactaccgtgaatcctggcaaccacagcaaatgagcccgcttgcccttgaacgtgcgcaggagattgcccgtaaagtggtgctggcactgggcggttatgggttgtttggtgtcgagctatttgtctgtggtgatgaggtgattttcagtgaggtctcccctcgtccacatgataccgggatggtgacgttaatttctcaagatctcagtgagtttgccctgcatgtacgtgccttcctcggacttccggttggcgggatccgtcagtatggtcctgcagcttctgccgttattctgccacaactgaccagtcagaatgtcacgtttgataatgtgcagaatgccgtaggcgcagatttgcagattcgtttatttggtaagccggaaattgatggcagccgtcgtctgggggtggcactggctactgcagagagtgttgttgacgccattgaacgcgcgaagcacgccgccggacaggtaaaagtacagggttaaacccggcaaaaaaacgctacaaaaatgcccgatcctcgatcgggcattttgacttttacagcttagcgccttctacagcttcacgcgccagcttagtaatgcggtcgtaatcgcccgcttccagcgcatctgccggaaccagccaggaaccaccgatgcacagcacgcttttcagcgccaggtagtcacggtagttagccggagaaataccacccgtcgggcagaaacggacctgggagaacggacccgcgatcgcctgcagggctttcacgccgccgttagcttcagccgggaagaatttgaactctttcaaaccgtagtccatacccagcatcagttcggaaacagtgctgatccccggaatcagaggaatagtcccttcggtagcagctttcagcagcggctcggtcagacccgggctaattgcgaactgtgcacccgcttcagtgacttctgccagctgctgtggattcagcaccgtaccggcacccacaatcgcttcaggcacttctttggcgatagcacggatagcgtcaactgcacactcggtacgcagagtcacttccagaacgcgcaccccaccagcaaccaacgcttttgccatcggcaccgcgtgttccagtttttttaccacgataaccggtacaaccgggccggtggtcaggatactttctgcacttgttttccagtttttcatcagagttttctctcgcctgattacaaatttgtcgtcttaaaaagtgatacaggttgcgccctgttcggcaccggacagtttttcacgcaaggcgctgaataattcacgtcctgttcccacgcgactcgcgctcaggtcaggaatgtgcggttcgcgagcagccagttccgcttcgtctaccagcagcgtcagttcgcctgtctgtccattcacacgaatgatgtccccgtcgcgcacttttgccagcagcccgccatcgtaggcttctggtgttacgtggatagcactcggcactttaccactagcgccggagagtcgtccatcggtaactaacgcaattttgaaacaccggtccaataatacaccaagtggcggcatgagtttatgtaattctggcattccgttcgcttttggcccctgatgacggacaacaacgacacaatcgcggtccagcaaacccgcttcaaaggccggcataacgtcatgctggctttcaaaaacaaccgctggcgcttcaatcacctggttctcaaccggcacggcagaggttttcataaccgcacggcccaggttaccgcttaacacttttgtcccaccatgatgagagaaaggttgttcgaaggaagcgatcacattgctgtcgagacttttttccgccccttcccgccagtccagttcaccattattcagccatggttcaagggtataacgagacagaccaaaacctgccaccgtattgacatcttcatgcagcaggcctgctttgagcagttcacgcaccagaaccggtacgccacctgccgcctggaagtggttaatatcggccggaccgttcgggtagagacgtgccatcagcggtacaacatcagaaaggtcagagaagtcatcccagttaatctgaataccggccgcgcgcgccatcgccaccaggtgcatggtgtggttagtggaaccaccggtcgccagcagtgcaacgataccgttcaccaccactttctcatcgatcatcttaccgatcggcatccattcattaccattaccggtcatgcgtgtaacctgacgcgcagctgcggcggtcaaagcatcgcgcagcggagaatccggatgaacaaaagaagagcctggcaactgcatccccataaactccaccaccatctggttggtgttggcagtaccgtagaaagtacatgttcccggcgcatggtaagacgcggcttcactctccagtaaggccatgcggtccactttaccttcggcataaagctggcgaatacgcactttttctttatttggcaaaccgcttgccatcggtccagacggcacaaacaccgcaggcaaatgaccaaagctcagggctgccatcgtcagacccgggacaatcttgtcgcacacaccgaggaacagagcaccatcaaacatgttatgggacagccccaccgccgcagacatcgctatcacttcgcggcttagcaggctcaattccattccatcctgcccctgggtgacaccatcacacatcgccggaacaccgcccgcaacctgaccaaccgcattcgcttcatgcagggctttacgaatgatttctggatagtgttcataaggctggtgcgcggagagcatgtcgttataggaggtgatgatggcgatattgttacgcaacatgcttttcaaagaggctttgtcttctggctggcaggcagcgaaaccgtgtgccaggttaccgcatgccaactggctacgatgaacggtgctagttttcgcttgttctatccgggcgagataagcagagcgagtctcgcggctacgttcaatgattcgatttgttacgcgtaacaattgtggattcataaaggctcctgaaattgagttgtcagagcaggatgattcacaacgcgtttcattcagaggatttatgactgaaacgcctgtaaccggagctcatagggcaaaaacgtttcagtcagtgtaataaaaaaagcctcgtgggtgaatccgcacgaggcctgaaagtgtaaaaattgttctacaatctgcgcaagatcatgttaccggtaaaataaccataaaggataagcgcagatattactcaaactcattccaggaacgaccatcacgggtaatcatcgccacgctggcaacgggtccccaggttccggcctgatacggtttcggcgcatcattgtccatcgcccacgcctcagtaatggagtctacccatttccaggcttcttccacttcgtcgcgacgtacaaacagtgcctgaataccacgcatggtttccagcagcaaacgttcataggcatccgccagatgcgtctgattaaaggtttcactatagctcagatccagcttggtgatttgcaggttatgtttgtggtcaaggccaggaactttattcagtacctggatatccacgccttcatcaggttgcagacggatagtcagtttattctgcggcagatcctgccagctttctttaaacagattcagttcaggtgttttgaaatagaccacgacttcagaacatttggtcggcagacgtttaccagtacgcaggtagaatggcacaccggcccagcgccagttatcaatgtcgacgcggatcgccacgaaagtttctgtattgctgctcttgttcgcgccctcttcttccagatatcccggcacttttttgccctgggcgaagcccgcagtatattgcccgcgtacggttttttcgcgtacgttggagcggtcgatgcggcgcagagacttcagtactttcactttttcatcgcggatgctgtctgcgctcaggtcagacggcggagacatcgcaatcatgcaaagaatttgcagcaggtggttctggatcatgtcgcgcatctgaccggctttatcaaaatagccccagcgcccttcgatccccacttcttctgccacggtaatctcaacatgatcaatggtgcgattgtcccagttattcacaaacagggagttagcaaaacgcagcgccaacaggttcagcaccgtttctttaccaagatagtggtcgatacggtaaacctggcactcctcgaagtattcgccaacctgatcattgatttcctggctggtcgccaggctcgtccccagcggtttctccatgactacgcgtgccggtttagcattcagttttgcctcgccaagccctttgcaaattgcgccaaaagtgctgggcggcatggcaaagtagttaatggtgatacgatttttttgatccagcatcgcgccgagacggctgaatgcagcagtgtcattgacatcgagattacaaaaatccagacgtgcactcagggtgtcccataaaccttcatcaatggtttctttcatgaaagtttcgagcgcctcgcggacaactttggtatatgccgctttatcccagtcagcacgccctacgccgataatccgggtgtccgggttgagctgaccggctttttccagttgatacagggaaggcagcaatttacgacgcgcaaggtcgcctttcgcgccgaaaatgaccaggtcacaggcctgggctgtttgcgttaccgccatgtcattctccttaagttaactaacccggtacttaagccagggtatacttgtaattttcttacggtgcactgtactgcttttacgagcttgcgaaaactgtaaacgcttatccacccgtgcgattacgggaaaagcgcgcaaagtgcggcaaaactgataaaaaaatcatcgttttccattgggtaaaaatctgacactgatcatgttatgaaaaaaaataacaacttttttatctgcttttgtcattaacacggcacacaggcgtaatatctgacaaaactgcatttcgatttctttcagtgcggaaatcgtcattacccgtgagtctctttacatcatgaatatgctggaaaaaatccagtctcagctggaacatttgagcaaaagtgagcgcaaagttgccgaggtcattctggctagccccgataacgcgatccatagcagtattgctgctatggcactggaagccaatgttagcgaaccgacggtgaatcgtttctgtcgcagcatggacacgcgcggttttcctgattttaaacttcatctggcacagagtctggcgaatggcactccctatgttaatcgcaatgtcaatgaagatgacagcgttgaaagttacacagggaaaatatttgagtccgcaatggcaacgcttgatcatgtccgtcatagtctggataaatctgccatcaaccgcgccgtcgacttgctcactcaggcaaaaaaaatcgcctttttcggattaggctctagtgccgccgttgcccacgatgcgatgaataagttctttcgttttaatgttccggtggtgtactccgatgatatcgtgctgcaacgcatgagttgtatgaattgtagcgacggagacgtggtggtgctgatttctcacactggaagaacaaaaaatctggtcgagctggcgcagctggcacgcgaaaacgacgccatggtgattgccctcacctctgcgggtaccccgctcgcccgggaagcaacgctggcaattaccctcgacgtaccggaagatactgacatttatatgcccatggtttctcgacttgcacagctgaccgtgatagatgtgctggcgacaggatttactttgcgacgcggtgcaaaattcagagataacttgaagcgggtcaaagaagcgctgaaggaaagccgttttgataagcagttacttaatttaagtgacgatcgctaaaaacgactgtcactgtcctaatcttatacgacatccgaatgagattaatttatcgccatcgcggcgttatttcattcggatttcatgttcaagcaacacctggttgtttcagtcaacggagtattacatgtccagaaggcttcgcagaacaaaaatcgttaccacgttaggcccagcaacagatcgcgataataatcttgaaaaagttatcgcggcgggtgccaacgttgtacgtatgaacttttctcacggcagccctgaagatcacaaaatgcgcgcggataaagttcgtgagattgccgcaaaactggggcgtcatgtggctattctgggtgacctccaggggcccaaaatccgtgtatccacctttaaagaaggcaaagttttcctcaatattggggataaattcctgctcgacgccaacctgggtaaaggtgaaggcgacaaagaaaaagtcggtatcgactacaaaggcctgcctgctgacgtcgtgcctggtgacatcctgctgctggacgatggtcgcgtccagttaaaagtactggaagttcagggcatgaaagtgttcaccgaagtcaccgtcggtggtcccctctccaacaataaaggtatcaacaaacttggcggcggtttgagcgctgaagcgctgaccgaaaaagacaaagcagacattaagactgcggcgttgattggcgtagattacctggctgtctccttcccacgctgtggcgaagatctgaactatgcccgtcgcctggcacgcgatgcaggatgtgatgcgaaaattgttgccaaggttgaacgtgcggaagccgtttgcagccaggatgcaatggatgacatcatcctcgcctctgacgtggtaatggttgcacgtggcgacctcggtgtggaaattggcgacccggaactggtcggcattcagaaagcgttgatccgtcgtgcgcgtcagctaaaccgagcggtaatcacggcgacccagatgatggagagtatgattactaacccgatgccgacgcgtgcagaagtcatggacgtagcaaacgccgttctggatggtactgacgctgtgatgctgtctgcagaaactgccgctgggcagtatccgagtgaaaccgttgcagccatggcgcgcgtttgcctgggtgcggaaaaaatcccgagcatcaacgtttctaaacaccgtctggacgttcagttcgacaatgtggaagaagctattgccatgagtgcaatgtacgcagctaaccacctgaaaggcgttacggcgatcatcaccatgaccgaaagcggtcgtaccgcgctgatgacctcccgtatcagctctggtctgccaattttcgccatgagccgccatgaacgtacgctgaacctgactgctctctatcgtggcgttacgccggtgcactttgatagcgctaatgacggcgtagcagctgccagcgaagcggttaatctgctgcgcgataaaggttacttgatgtctggtgacctggtgattgtcacccagggcgacgtgatgagtaccgtgggttctactaataccacgcgtattttaacggtagagtaagtacgttgccggatgcggcgaaaacgccacatccggcctacagttcaatgatagttcaacagatttcgaatattctgaagcaaacttgaacttatcatcaggcgaaggcctctcctcgcgagaggcttttttatttgatgggataaagatctttgcgcttatacggctggatttcgcccggtttgcgagttttcagcaattttagtatccaggtgtattgttctggtcgcggaccaacaaaaatctcgacttcttcattcatccgccgcgcaatcgtatgatcatccgcctctaacagatcatccatcggtgggcgcacctgaatcgtcagacgatgcgtcttgccatcataaatcggaaacagcggtacaacgcgcgcacggcacactttcatcaaacgaccaatcgcgggcaacgtcgctttataggtggcaaagaaatccacaaattcgctgtgctctgggccatgatcctgatcgggtaaataatatccccagtacccctgacgtacgctctggatgaatggtttaataccgtcatttctcgcatgcagacgaccgccaaagcgacgacgcaccgtgttccagacataatcaaaaaccgggttgccctgattatggaacatcgctgccattttctgcccttggctggccatcagcatggcaggaatatcgacggcccaaccgtgcggcaccagaaagataactttctcgttattacgccgcatctcttcgatgatctccagcccttgccagtcaacgcgcggctgaattttctccggcccgcgtattgccaactcagccatcattgccatcgcttgcggcgcggtggcaaacatctcatcaacaatcgcttcgcgttcagcttcactacgttctggaaagcagaggctcagattgattaacgcacgacggcgactgctttttcccagtcgtccggcaaaacgtcccagccgtgccagaatgggatcacggaactttggcggcgttaaagcgatacccgccatcgctgctacgcccagccatgctccccagtagcgcgggtggcgaaaggatttatcaaactcaggaatgtattcgctattattttttttcgtttccatgcttttccagtttcggataaggcaaaaatcaatctggtgatagtgtagcggcgcaacttgccccgcaccaaataaaaaaagccggtactgactgcgtaccggctgcgaatggatgttaattaatcaaaccgtagctgcggcacaatctctttggcctgcgccaggaattcgcgacgatcggagccggtcagcccttcggtacgcggcagttttgccgtcagcgggtttacggcctgctggtttatccatacttcatagtgcagatgcggcccggtactacgtccggtattaccggaaagcgcgatacggtcgccacgtttcaccttctgtcccggtttcaccagaatcttgcgcaagtgcatataacgcgtggtgtagctgcgaccatgacgaatagccacataataacctgctgcgccactgcgtttggcaaccaccacttcaccgtcacccacactaagcactggcgtaccctgcggcatggcgaaatcaacacctctgtgtggtgcaacgcgaccggtcaccggattagtacgacgcgggttaaaattagagctgatacggaactgtttcgccgtcgggaatcgcaagaatcctttcgccagaccagtaccgttacgatcgtagaatttgccatcttcagcgcggatagcgtaataatctttaccttcactacgcaaacgtacgcccagcagctggctttgctcacgtttaccatcaagcatttctcgagacattaacaccgcaaattcatcgccttttttcagtttgcggaaatccatttgccactgcatggctttaatcactgcgctcacttcggcgctggttaaaccggcgtttctggcgctggcaacaaagcttcccccgacggtacctttcagcagattgttaacccactctccttgctgcatttcgctggtcattttaaaaccgttagcggcagtacggtcataggttcgggtttcacgacgagacacttcccaggtgaggcgctgcagttcgccgtccgcggttaatgtccaggagagttgttgaccgattttcaggttacgcaattctttgtcggccgcagccagttgggtgatatcacccatatcaataccatactgattgagaatgctgcttagcgtatcgccagtggaaacaacatattcatgcacgcccgcttcaccggcgattttgtcatccagttcgtcctggggaatggcttcatcttcttgtgcagcttgatcaatcggctcactggcttcaggtaagaggctacgaatttcgttctgttccagctcaatggttttgacaattggcgtggcatcacggtgataaacataaggccgccagacagcgacggccagagtaagaacggtgaggctccccaacataacgcggtgtggtcgcggtaaattattaaacgccagggcgacagagcgggctatctgttgcacgtaatcacttcctcattaatctcctttcaggcagctcgcatactggttggctaattgactcaggaattcactatagcttgttttacccagtttgatattcgtccccaggggatccaacgttcccatacgaacggatgtccctcgtgcgacgctctcaacgaccgctggcctgaactgtggctcagcaaaaacgcaggttgctttttgctcaaccaactgtgttcttatttcatgtaaacgctgcgcgccaggttgaatctcagggttaacggtaaaatgaccaagcggtgtcagtccaaactgtttttcgaaatagccgtaagcatcgtgaaaaacgaaataacctttccccttgagcggcgcgagctcgttaccaacctgcgtttcggtactggctaattgtgcctcaaaatccttcaggttggcgtcaagtttggctcgactttgcggcataagttccactaattttccatggattgcaaccgctgtagcccgcgctatctctggggaaagccaaagatgcatgttgaaatcgccgtgatggtgatcttcgtcacttttttccgcgtggtcgtgatcatcatcatcgccgtgaatacttttcatcagtagcggtttcacatcttcaagctgcgcaatcgttacctgcttcgctcctggtaatttgcttaccggtttttgcataaacgcttccatctccgggccaacccaaacgactaagtccgcgttctgtaagcgttttacatcgcttgggcgcagactataatcatgttcactagcgccgtcaggaagtaaaacctctgtttctgttaccccatcagcaatggcagaagcgatgaacccaacgggtttaaggctagcgacaacggcggcatctgcggcctgtgttgcacctccccagagagcggcggataatgctgcgaaaagaagcgtttttttatgtaacataatgcgaccaataatcgtaatgaatatgagaagtgtgatattataacatttcatgactactgcaagactaaaattaacatgacaagtctggtttccctggaaaatgtcagcgtttcttttggccaacgccgcgtcctctctgatgtgagcctggaacttaaacctggaaaaattttgactttacttgggccaaatggcgcaggtaagagcacactggtacgggtagtgctcgggctggtaacacccgatgaaggggttatcaagcgcaacggaaaactgcgcatcggctatgtaccgcagaagctgtatctcgacaccacgttgccactgaccgtaaaccgttttttacgcttacgccctggtacacataaagaagatattttgcctgcactgaaacgtgtccaggccgggcacctgattaacgcaccgatgcaaaagctctctggtggcgaaacgcagcgtgtactattagcgcgagcattgttaaatcgcccgcaattattagtgctggatgaacccactcaaggcgtggatgtaaatggccaggtggcgttatatgaccttattgaccaactgcgtcgtgaactggattgtggcgttttaatggtttctcacgatctgcatctggtgatggcaaaaaccgatgaagtgctgtgcctgaatcaccacatttgttgttccggcacaccggaagttgtttccctgcatccggagtttattagtatgtttggtcctcgtggtgctgaacaactgggtatctatcgccatcatcataaccatcgtcacgatttacagggacgaattgttttgcgtcggggaaatgatcgcagttgatttaacgtcggggaaatgatcgctcatgattgaattattatttcccggttggttagccgggatcatgctcgcctgtgccgcgggtccgctgggtagctttgtagtctggcgtcgtatgtcttatttcggtgatacgctggctcatgccagtttacttggcgtcgcgtttggtttgttgctggacgtgaatccattctatgcggtgattgccgttacgctgctgctggcgggcggtctggtatggctggagaagcgtccacagctggcgatcgacacgttattagggattatggcgcacagtgccctgagcctgggcctggtggtcgtgagtctgatgtctaatattcgtgttgatttgatggcttacctgttcggtgatttgctggcagtgacgccagaagatctcatctctattgcgattggcgtggtcatcgtggtggctattttgttctggcaatggcgcaatttgctgagtatgacgataagcccggatctggcgtttgttgatggtgtgaaattacagcgagtgaaattgttgttgatgctggtgacggcattgacgattggtgtagcgatgaaatttgtcggtgcgttgattattactagcttgctgattattcctgctactactgcgcgtcgctttgcccgcacgccggaacagatggctggtgtcgctgttttggtggggatggtggcagtgactggcggtttaaccttttccgcggtttacgatacgccggcgggtccgagcgtggtgctatgtgcggcactgttatttattctcagtatgatgaaaaagcaggccagctaatctatcgctgaacacatttgtcggatgcggcgcgagcgccttatccgacctacggttcggtatctctggtagtcctggtaagacgcgaacagcgtcgcatcaggcatattgccagtgccggatgcggcgcgagcgaccaatccgacttacggcatttctggcggcgttatgccaaagtgattccacgcccgcgtcgtcgccatacgcccacgcggtgtacgctgcaaaaagccttgctgaatcaaataaggttccagcacatcctcaatggtttcacgttcttcgccaatggctgccgccaggttatccagacctacaggtccaccaaagaacttatcgattaccgccagcaacaatttgcggtccatataatcgaaaccttcagcatcgacattcaacatatccagcgcctgagcagcgatatctgcgctgatggtgccatcgtgcttcacttcggcgaaatcacgcactcgacgcagcagacggttggcaatgcgcggcgtaccgcgagcgcgacgagcaacttccagcgcgccgtcatcactcatctcaagccccataaagcgtgcgctgcgactgacgatatattgcagatccggcacctgataaaactccagacgttgcacaataccaaaacggtcgcgcaacggacttgtcaggctacctgcgcgcgtggttgcaccaatcagggtaaacggcggcaaatcaattttaatggagcgtgccgccggaccttcaccaatcatgatatccagttggtagtcttccattgccgggtacagcacttcttcaacaactgggcttagacggtggatctcatcaataaacagcacgtcatgcggttcaaggttagtgagcatcgcagccaaatcgcccgccttttccagcaccggaccagaagtcgtgcgtaaattaacgcccatttcattggcgacaatgttggcaagcgtagttttacccaaccccggaggaccaaaaatcaacaaatgatcgagggcatcgccgcgcagtttcgctgctttgatgaaaatctccatctgactacgaacctgcggctgaccaacatactcttccagtaatttggggcgaatggcgcgatctgctacatcttccggcaaagtggtaccggcagaaatcagacggtctgcttcaatcatcctttacctcataacgcggcgcgtagggcttcgcgaattaaagtttcactgctggcgtcagggcgagcgattttgctcaccatgcggcttgcttcttgtggtttatagcccagcgccaccagcgcggcaaccgcttcttgttcagcatcgtcggtcgccgggctggcaggagacgtgagtaccaggtcggcggctggcgtaaagagatcgccatgcaaacctttaaatcggtctttcatttcaacaatcaagcgttcggcggtttttttgccaatacccggcagtttcaccagtgcccccacttcttcacgctcaacggcattaacgaactgctgcgcactcattccggagaggatcgccagcgccaacttcgggccgacgccgttggttttgatcaactctttgaacaatgtgcgctcttgtttattgttaaaaccgtacagcagttgcgcgtcttcacgcaccacaaagtgggtgaaaacgatcgcttcctgacccgcttcagggagttcataaaaacaggtcatcggcatatgcacttcatagcctacgccgcccacttcaattaacaccagcgggggttgtttttcaatgatgatgcctctgagtctgcctatcacatgacgctcctgcgtaatgaatcaaagataatgctgtatgataaaaaaatgctggatagatatccagcgaaggatgaagaaaacttgcgaggtgtctcgatgaactgaaaaatggcacagtataatttattctacaggttatattggaagcaaatattttaatattacatattcagtgaagaaatgcgtaataaaaatatacattgcgcctcctgaaaaaataaattttttatgctattacgtatatttgtatctatttcaatggaatgacaacgtgaatattaattaccctgctgaatatgaaattggagatatcgtctttacatgtataggtgctgccttatttggtcaaataagtgctgcaagtaattgctggagtaatcacgtcgggatcattatcggtcataacggtgaagacttcctggttgcagaaagccgggttccccttagtaccatcaccacgctatctcgttttattaaacgtagctctaatcaacgctatgctataaagcgattagacgctgggctgacagaacgacaaaaacaacgaattgttgaacaggttccctcccggctacgcaaactttaccacaccggttttaaatacgaatctagccgccagttctgtagtaaatttgtttttgatatttataaagaagcgctatgtattccggtgggtgaaatagagacgtttggagaattgttaaatagcaatccgaatgcaaaactcactttctggaaattctggttcctgggttctattccgtgggagcgtaaaaccgtcacgccagccagtttgtggcatcatccgggtttggtgttgattcatgcggagggagtggaaacgcctcagccggaactgaccgaggcggtataacttaacgcagtcgccctctcgccaggttcagccggctttcgctcatctgcatcgcattctgactaacgtggcagtgggtgatagcaatcgccagcgcatcggcggcatccgcctgtggattagcgggcagtttcagcaaggtgcggaccatatgctgcacctggcttttttcggcactgccaatacctaccaccgtttgctttacctgacgtgccgcgtattcaaatactggcaactcctgattcaccgccgccacaatcgccacgccgcgcgcctggcccagtttcagggcactgtcagcgttctttgccataaagacttgttcaatggcgaaataatcaggctggaactgggtgatgatttccgtcacgcccgcatagatgagtttcagacgagacggtaaatcatccactttggtgtggatgcatccgctacccaggtaggacagttgcctacctacctggcggatgacgccgtagccggtcacgcggctacccggatcaatgccgagaataatagccatcacgcgtctccgttttgctgtttagcaggcctcatcagagagtcgctgcgacctcatcagagatttcaccgttatggtaaacttcctgcacgtcgtcgcaatcttccagcatatcgatcagacgcatcagtttcggtgcggtttctgcatccatatcagctttggtagacgggatcatggaaacttccgcgctgtctgctttcagacctgccgcttccagagcgtcgcgcactttacccatttcttcccatgcagtgtagacatcaatcgcgccgtcatcataggtcacaacgtcttcagcacctgcttccagtgctgcttccatgatggtgtcttcatcgcctttctcgaaggagatcacgccttttttgctgaacagataggcaacggaaccatcagtaccgaggttaccgccacatttgctaaatgcatgacgcacttcagcaacggtacggttgcggttgtcagacagacattcaatcatgattgccgtgccgccaggaccgtaaccttcgtagatgatggtttccatgtttgcatcatcatcaccgcccacaccacgtgcaattgcgcggttcagtgtgtcacgggtcatgttgttagacagtgctttatccaccgccgcacgcagacgcgggttagcgtccggatcgccaccgcccagcttagccgcggttaccagctcacgaatgattttagtgaagattttaccgcgcttagcatcctgcgcagctttacgatgtctggtgttggcccatttactatgacctgccataaaaatatctccagatagccctgcctgttcaggcagcgttaattacaaactgttcaatcgcctgccggttgctccaggacttagtgagcgccgccgcagcaggcgcatcaagccacttgtaagccagatgttcagtgaaaacgatctgccgctcgtgcggaagcgcaagacagaaccaactttccgtattacgcgtcacgcccggcgcatagcgatgacgtaaatgactaaaaatttcaaactctaccgtgcgctgacagtcaattaaggtcagttgttcagcgacaacatcaatggtgacctcttcctttacttcgcgcatggcagcttgcggcgcggtttcaccctcttccacgctgccggttacgctctgccagaaatcgggatcgtcacgccgctgcaacatcagcacccgtttcgtatcttgtgcgtagatgaccactaagatgctaacgggacgcttatacactttatccttcacgctgcctcttcgttgactgccttcgctcatcccattcacatagttatctatgctcatgggagttcactcagttgccgcctcgatgcaacgcgaatgatttcgtgtatttgagtcatatcagttattctcagccttcttcacaacctgaatgctcagctcagccagtgcagtcgggttagcaaagctcggtgcttcagtcatcagacacgctgccgccgtggttttcgggaaggcgataacgtcacggatattgtcggtgccggtcagcagcatggtcagacggtcaagaccgaatgccagacctgcgtgcggcggagtaccgtatttcagagcgtcgagcaggaagccgaatttctcgcgctgttcctcttcgttgatacccagaataccaaacaccgtctgctgcatatcaccattatggatacgtacactaccaccgcccacttcgtaaccattgatgaccatatcgtaagcgttcgccaccgcattttccggtgcagctttcagttctgcagccgtcatatctttcggactggtgaacggatggtgcattgccgtcaggccgccttcaccgtcgtcttcaaacatcgggaagtcgataacccacagcggtgcccatttgctttcgtcggtcagaccaaggtctttacccactttcaggcgcagtgcacccatcgcgtcggcaacaattttcttgttgtcggcaccgaagaaaatcatatcgccatcttgcgcggcagtacgatccaggatgtcttcgatgatttctgcattaaggaacttcgctaccgggctgttgataccttccagacctttcgcgcgttcgttaactttgatgtaagccagacctttcgcgccgtagattttaacgaagttaccgtattcgtcgatctgcttacgggtcaggcttgcgccgcccggaacgcgcagagccgctacgcgacctttcggatcgttcgccggacctgcaaatacagcaaactcaacagatttcagcagatcagcaacgtcagtcagttccatcgggttacgcagatccggtttatcagaaccataacggcgttctgcttccgcaaaggtcattaccgggaaatcgcccagatccacacccttcacttccagccacagatgacgcaccagcgcttccatcacttcacgcacttgcggcgcggtcatgaaagaagtttccacatcgatctgagtaaattcaggctgacggtcagcacgcaggtcttcgtcacggaagcatttaacgatctgatagtaacggtcaaaaccggacatcatcagcagctgtttgaacaactgcggggattgcggcagtgcgtagaatttacctttgtgcacacgagaaggcaccaggtagtcacgcgcgccttccggcgtggctttggtcagcatcggagtttcgatgtcgaggaagccgtggtcatccataaaacggcgcaccaggctggtgattttagcgcgggttttcaggcgctgagccatttccggacgacgcaggtcgaggtagcggtatttcagacgcgcttcttcggtgttgacgtggttagagtcaagcggcagaacatctgcgcggttgatgatagtcaggctggacgccagcacttcgatttcgccggtcgccatatcgcggttaatatttttttcgtcacgcgcacgtacggtgcccgtgacctgaatgcagaactcattacgcagttcagaggccagctttaacgcgtccgcacgatccggatcgaaaaatacctgcacgataccttcgcggtcgcgcatatcgatgaagatcaggctaccaagatcacgacgacggttgacccaaccacacagagtcacctgctgccccacgtgggacaaacggagctgtccacaatattctgtacgcatgagatatcccttaacttagctgccggcggatgccccctgctgcgcaggtgaccaagtcgcagcgttagctgtatgtcacaactgaatgaaaaaaggcggctattatactggaaattctgccgcaccgtaagagcctggcccgcgctggaacgcctcgttaccactttatatcgggcctgaaatcagactctacgccagtttgctataaaggtgttgcccgaactcataaaaattaacaaaatttgtcgttccgccatcggctaatcgcattaaggtgtgaggcacgattttgttttttcaggagtcattatgcttgaacttaatgctaaaaccactgcgctggtggtgatcgatttacaagaaggcatcttaccttttgccggtggtccacatactgccgatgaggtagttaatcgcgccgggaagctggcggcgaaatttcgcgccagcggtcagcccgtgtttctggtgcgcgttggctggtctgccgattacgctgaagcattaaaacagccggtcgatgcgcccagtccggctaaagtgttgcccgaaaattggtggcaacatcctgctgcattaggtgcaaccgacagcgatatcgaaatcatcaaacgtcaatggggtgcgttttacggtacggatctggagttgcaattacgccgccgaggtatcgatacaatagtgttatgtgggatcagcaccaatatcggtgttgaatccaccgcccgcaatgcctgggaacttggctttaatctggtgattgccgaagacgcctgtagtgccgccagcgccgagcagcacaataacagtatcaaccatatctacccgcgcatcgcccgtgtgcgtagcgtggaagagatcctcaacgcgttatgatttacatcggtctaccgcaatggagccatcctaaatgggtgcggttggggatcaccagccttgaagagtatgcccgccactttaactgcgtggagggcaacaccacgctttacgccctgccgaaacccgaggttgtcctgcgctggcgtgagcagaccacagatgacttccgcttctgttttaagtttccggcgaccattagccatcaggcagcattacggcattgcgatgatttagtgactgaatttttgacccgcatgagtccgttggctccgcgcattgggcaatactggctgcaactgcctgccacattcggcccacgggagctgcctgcgctttggcattttctcgattctcttcctggcgaatttaattatggcgtggaagtccgccatccacagtttttcgccaaaggagaagaggaacaaacgcttaatcgcggtttacatcagcgcggcgttaatcgggtgattttagacagccgcccggttcatgcagcacgtccacacagtgaagctattcgcgacgctcaacgaaaaaaacctaaagttccggtacatgctgtactgacggcgacaaatccgctgatccgttttatcggtagtgatgatatgacgcaaaaccgggaattatttcaggtctggttacaaaaattagcgcagtggcatcagaccactacgccttatctttttttacatacgccagacattgcccaggcaccggaactggtacataccctgtgggaagacttacgtaaaacgcttccagagatcggagcagttccggctattccacagcaatcttctcttttctgaatttgccacctatcatagacaggtgccatcggccattttaaagggagtttgtatggtaagcgcgctgtacgccgttttaagtgcgttgttattaatgaagttctcttttgatgtcgttcgcctgcgaatgcagtaccgcgttgcctatggcgacggcggttttagcgaactgcaaagcgctattcgcattcatggtaacgcggtggaatatattcccatcgcgattgtgctgatgctgtttatggaaatgaatggcgcagaaacctggatggtgcatatttgcggcatcgttttgcttgctggtcgtctgatgcattattacggttttcatcaccgtctgttccgctggcgacgttccggcatgagcgccacctggtgtgcgctgttgctgatggtgctggcgaatctttggtatatgccctgggagttggttttctccctgcgttaacgcacaatacgccactttctttttcccggatttttacgttatgtctcaccgcgacacgctattttctgcccctatcgccagactgggcgactggacctttgatgaacgggtagctgaagtcttcccggatatgatccagcgttccgtacccggctattccaatattatttccatgattggtatgttagccgagcgcttcgttcaacctggtacgcaggtttacgatctgggttgttctctgggcgcggcgacgctcagcgtgcgtcgcaacattcatcatgataattgcaaaattattgccatcgacaactccccggcgatgattgaacgctgccgtcgtcatattgacgcctataaagcccctacgccagtagacgtcattgaaggtgatattcgcgatatcgccattgaaaacgcaagcatggtggtgctgaattttaccctgcaattcctggaaccttccgagcgccaggcgttactggataaaatttatcaagggctgaaccccggcggcgcgctggtgcttagcgaaaaattcagtttcgaagatgccaaagttggtgaactgttgttcaacatgcaccacgactttaaacgtgccaacggttacagcgaactggagatcagccagaagcgcagcatgctggaaaacgtgatgctgaccgattccgtggaaacccataaagcacgcctgcataacgccggttttgagcatagtgagctgtggttccagtgctttaactttggtagtctggtggcattaaaagcagaggacgctgcatgatcgactttggtaacttttattctctgattgccaaaaatcatcttagtcactggctcgaaacgctgcccgcgcagattgctaactggcagcgcgagcagcagcacgggttgtttaagcagtggagtaatgcggtggagtttctacctgaaattaaaccgtatcgtcttgatttattgcatagcgttacggcagaaagcgaagagccactgagcgcagggcaaattaaacgcattgaaacgctgatgcgcaacctgatgccgtggcgcaaagggccgttcagtctgtatggcgtcaacatcgataccgaatggcgttccgactggaaatgggatcgtgttctgccccatctttctgatttaaccggacgcaccattctggatgtcggctgcggcagcggttatcacatgtggcgcatgattggcgcaggcgcgcacctcgcggtggggatcgaccctacgcaactgtttctgtgccagtttgaagcggtgcgtaaactactgggtaatgatcagcgcgcgcatttgttaccgttaggtattgaacaacttccggcactgaaagcctttgataccgtctttagcatgggcgtgctttaccatcgccgtagtccgctggagcatctatggcagttgaaagatcaactggtcaatgaaggtgaactggtgctggaaacgctggttattgatggtgatgagaacacggtgctggtaccaggcgatcgttacgcgcaaatgcgtaatgtctatttcatcccttccgcgctggcgctgaaaaactggctgaagaagtgtggttttgtagatatccgcattgcggatgtgagcgttaccaccacagaagagcagcgacgcaccgaatggatggttaccgaaagcctggccgatttcctcgacccacatgatccgggtaaaacggtggaaggttatccggcacctaaacgcgcggtgctgattgcgcgcaagccgtaaaggtctggtattactgccggatgcggcgtgaacgccttatccggcctacaaaaccttgctaattcaatatattgcagggactatgtaggcctgataagcatagcgcatcaggcagctttacgtttgcataacctcagcgcccgtttccgggcgctattcacgtcttacgcctgaacagctggctgatcaaacgccgttaacttcggtgcattgcccgtatatttttcgatatacaccaacgcactgttaccggcacaggcatttgccagctggctgctggggatatccgccgttaacacgttcgcactgccgtttttacacaagccattttccagatctggccatgcaccttcatgcacgcataccacgccttttttgatcccgtcagtcaccaccgcgcctgtcaaaatctgaccacgtttgttccagacacgcaccagatcgccattcgcaataccaaagcgtgcagcatcttcggtgtgaatagtgattggttcacgatcggcgatcgcatattttttacgcagttccgcatagttaagctgactgtgtaaacggtgtgccggatgtgcggtcagaagctgtaactgcttctcgtcggcggtacctttccattcatcaggagccagccaggttgggtgtgccgggcaatccttatagccaaatttttccaacgttttactatagatttcaattttgccgcttggcgtacccagcgcatttttcaccggatcggcgcggaaatcaccataacgaacgtactgttcgttcttctcgctgtggcgcatttcgatcagtttattttgctgccagaaggcattaaacattggcatagtgacgcgttgcgcacgggcacctttctgagcggcatcatagaaaaatttcagccacgccatttcatctttaccttcggtatagatctcttttccgccaggtttgagtaattccgcaagatcggcaaacacgtcaaaatcgttacgcgcttcaaattgcggagcaacagcctgcttcatcggcacaatatgctggttgctgtaatcaccggtcatcgtcaagtcattgcgctcaaagcttgtggtgatcggtaatacgatatctgcgtgtttggctgctgcggtccagtagcattcagaaacgacgatcatctccggtttctgccatgctttaatcagacgattagtatcctggtgatgggtaaagttaccgccacccgcccaccagatcattttgatattcggatacgtttgttctttaccgttatgctgatatttgccgccaggattttccagcgcatcgacgatacgggcaacaggaatcgccgtcattccgccatcatcagcggcctcgctggcatgtccggcaatcgccgcagacatttccggcagcacgccgccaacacgcgtcgggttgccaccgttggagtaatgataagagaaaccaaaaccgccgcccggtgtaccaatctgccctaacatcgccgccagcgtcaccagcatccagtgtttctgttcaccatattgctggcgctgaattccccagcctgccatcagcattgtgcgattcgccgccatcagttcagcgagtttgactatctgcgcttccggtacgccagtaatttccgccgcccagaccgcgctcttcggcgtattatcgctcttacctgtcagatactcttcaaactgcggatacccggtagtgtatttttcaaggaacactttatcgtgtttgccttgtgtcatcagggtatgcgcaatccctaacatcagtgccacgtcggtgcccatattcggcgcgatccaggtggcattatcgtcaaagaattcgatggtttcggagcggataggatcaatggcaatcactggtttgccagattttttcagctgatggaagtattccagcccttgctcatcggtactgctccaggcaatttttaaggtattcagcgggttcattccccacagcaccacaacctggctgttttccagaatcagcggccaggaggtctgctgttcatacacctctacagaaccgaccacatgcggcatgatcacctgtgctgccccggtactataatcgccgctatgcccggaataaccgcccgccaggttcatataacgttgcagtaaggtttgcgctttatgcaacacgccagaagagcgccagccgtaagatccggcaaaaatggcgcttggtccgttagctttacgaatacgatcatgttgctcatgaatcagttttaatgcctgttcccagctcacctgtacataggtatcttcgccacgacctttcgccggttgcagtggattatcgagatagctttttctcaccatcggatgctgaatacgcgccgtggtgtgtacctgatccgccgccgtagactgtaaggaattcggtatggttttcgccagcgcgcctgtactagaaacaatcttgccgtccttcacttctacgttcatcgctccccaacgtcccgcggtgaggattttaccgcccttctcttctgcccatgcggggagcggtgctgcgcttgtcaccaccagcgctccagcggcaataccgctgtgtttaataaattcacgtcttgttaatgtcataacttcctccctgatcaacgaggatcactgtttctcggtaatatctttggcgttgtactggaaataccgcgttaaaatgtccagttcgttttcgctcatgctggttcgtgcccccattcctttggcaatggacggccacgcattgacggtgtaatggtcggcggcaataggggcatgacaaccagcgcaataggtatcgtcaagtttttcagcgtattgccatagcggtttacggtccgctaatgcgggatcggtaagcgcaccctgtaaagacgcctgacgccattgattgccgtattcgtcagcctgccattccccgtttacagtgagcgccttgataccttcttcacttaatgtggctagcgccagccgttgacctgccgccaggtagagcgtgttttcactgccctgcatttgataaccctgcaacagaacgatcggctgtttgccactggcatcaacgacggtgagatcggttccaggattcacggtagccagctcgcctatgtgagaagttttgaaaggataaatatgtgcgccattagtaacactagtagcggcctgactttccagctcatgcgccgcgttgtcatccatttttatttctggcggaaaatgggcaatgcctttatgacaatcgatacaggtttcgctgtccttttgtgctttgttatgcattttctgcgcagattcactttggctggcaatatccatggcatcaaaagaatggcaactacggcacgttgcagagtcagtggcttttaattctttccatactgtttcggccatttcctggcgatgagcttcgaacttatcgtcactgtctattttgccgctaacaaattcatgataaatatctttagatgcctttaatttagcaaataaataatccatcccactctttggaatatggcaatcggcacattccgcacgtatccctttctggttgctaaagtggacagttccctgatattcctcaaaaggtttactcatgctgtggcaggaaaggcaaaatgctgtatcgctcgttttatgtaagactttttgcgccagcaataacccgccgccaccaaccacaaccgctatcagcaaaaacaataacccaatgcgttttttccctcgcatagattcctctaattaaattactggacaccgaaatcattgtataattaaatatacaacgaattaaccgcttgcataattaggcacaacactgcctgaaacaatcgataaagaatatgatttattacaatgtaatcattaattgctaaggaataacccagttgctatttagaatatatatttatcagttttagtaatttaaatcccataattaatgtgaatatatacaatatttttagcacaacgctatgcgcactgtcacccgctcaacagatcacggttatcgttcgttttttatactgttcagggataaaaaaaggcccctgttgaaattgcaggggcctggtacgagcaagcatcatattgggcgacatgatgcaacggtaaaaatcatttggcctgatggcgttcaatgattcctttcatttcagcaaccgccgccccgtctacgatataacggctatactcgtccgcgtgttcatcactactcatggacaatccttgattacgataacgcatcggactggcttgccacgctcccgcggagctatggacttccagcactccggcatcgaggaagtggtgcaggttttctgcacggactcctgctccggccataatgattggagcatcacgatgggcaataagttccataattttacttaaaccttgcagtgcgtcacttttttgcccacttgtcagtacccgggcaatgcccaattccgcaagattattgagtgtatataaagggttagcgcacatatcgaaggcgcgatgaaaagtcactgccagcggaccggcagcagccattattttttccattcgtggcatatcgacattcccgtcaacatcgagaacgcccgtcaccagtccaggaaaacctaattcgcggaccgtgcgcacatcctcaagaatggcggcaaactcaccgtcgctgtagcaaaaatcaccaccgcgtgggcgaattatcggatgcacagggatcgtcacccgctggcgcacggatttcagtacacccaagctcggcgttaagcccccctcttttggggctgcgcataattcaactctgtctgcgccgttttgctgcgccgttagtgcacattccatgctgtaacagcaaatttccagtaatgccatttttactccttaattacgcgctctgctcgctggcaacgatctcttcaatggaccacggatgaaacttaatagttgttttgccatcggtgaccgccagcgtcggattcggtaatcgctcatgctcaccttttgggctactggttttcacactgatccccggtaggctgagtccttcatcagaaagcaatgccagcgcacgggcattcagcgtttctggatcacccggcagaacgatttcaatatgttcccaaccttcgtgtgggtaacgtttttccccgggccacggtagctccacaatagaaaactgccagtgcgcaacctgtaccggttcatgcaatttaaacagacaaatcggtctgccattgatcatattttcactcaaaagctcgccacactgttcaaacccgcgacgccagcgttcagcagtggcgttttgatggcaacgcaaagaaatgtgatcggcagtcagcggagtgatattcaaccccagacggcgggaaagttcatctaatgcgtggataaatcgcggtaaatcgcttgcaatatcctgcagctcgtcgatagattgccagttcgccataatcactcttcgtctttcagtaaaagcgttaatttaccctgttgccctgtgccaaccaaccgctgatttcacgccgcttctgatgcaatagtgaaaacggcaatacgccacgcgcacgttgctgacgaaaacagccatttgcagtatactcccgccctaatttctttaactggtgcgggcaatttttgctcgcttcatcaatgtaaggtattccggtgaatattcaggctcttctcagtgaaaaagtccgtcaggccatgattgcggcaggcgcgcctgcggattgcgaaccgcaggttcgtcagagtgcaaaagttcagttcggcgactatcaggctaacggcatgatggcagttgctaaaaaactgggtatggcaccgcgacaattagcagagcaggtgctgactcatctggatcttaacggtatcgccagcaaagttgagatcgccggtccaggctttatcaacattttccttgatccggcattcctggctgaacatgttcagcaggcgctggcgtccgatcgtctcggtgttgctacgccagaaaaacagaccattgtggttgactactctgcgccaaacgtggcgaaagagatgcatgtcggtcacctgcgctctaccattattggtgacgcagcagtgcgtactctggagttcctcggtcacaaagtgattcgcgcaaaccacgtcggcgactggggcactcagttcggtatgctgattgcatggctggaaaagcagcagcaggaaaacgccggtgaaatggagctggctgaccttgaaggtttctaccgcgatgcgaaaaagcattacgatgaagatgaagagttcgccgagcgcgcacgtaactacgtggtaaaactgcaaagcggtgacgaatatttccgcgagatgtggcgcaaactggtcgacatcaccatgacgcagaaccagatcacctacgatcgtctcaacgtgacgctgacccgtgatgacgtgatgggcgaaagcctctacaacccgatgctgccaggaattgtggcggatctcaaagccaaaggtctggcagtagaaagcgaaggggcgaccgtcgtattccttgatgagtttaaaaacaaggaaggcgaaccgatgggcgtgatcattcagaagaaagatggcggctatctctacaccaccactgatatcgcctgtgcgaaatatcgttatgaaacactgcatgccgatcgcgtgctgtattacatcgactcccgtcagcatcaacacctgatgcaggcatgggcgatcgtccgtaaagcaggctatgtaccggaatccgtaccgctggaacaccacatgttcggcatgatgctgggtaaagacggcaaaccgttcaaaacccgcgcgggtggtacagtgaaactggccgatctgctggatgaagccctggaacgtgcacgccgtctggtggcagaaaagaacccggatatgccagccgacgagctggaaaaactggctaacgcggttggtattggtgcggtgaaatatgcggatctctccaaaaaccgcaccacggactacatcttcgactgggacaacatgctggcgtttgagggtaataccgcgccatacatgcagtatgcatacacgcgtgtattgtccgtgttccgtaaagcagaaattgacgaagagcaactggctgcagctccggttatcatccgtgaagatcgtgaagcgcaactggcagctcgcctgctgcagtttgaagaaaccctcaccgtggttgcccgtgaaggcacgccgcatgtaatgtgtgcttacctgtacgatctggccggtctgttctctggcttctacgagcactgcccgatcctcagcgcagaaaacgaagaagtgcgtaacagccgtctaaaactggcacaactgacggcgaagacgctgaagctgggtctggatacgctgggtattgagactgtagagcgtatgtaatcgatttttcgtgagagtgaagcctgatcagggttagccgatcaggcttttttattgccatctaaatgtattctgaaaatggacatgccattgttttctcactgttggataagaggccagaagcgtaatatccggccccagggaaacgataacggttgaatttaaggaataccgcagtgtttaaatttcttgtattaacattaggcattatctcttgccaggcttacgcagaagatacggttatagtaaacgaccatgacattagtgccatcaaagattgttggcaaaaaaatagtgatgatgatactgacgttaacgtgatcaaaagttgcctgcgacaagaatacaatctcgtcgatgcgcaattaaataaagcctatggtgaagcttatcgttatatagaacaagtgccacgcacaggtgtaaaaaaacctgataccgaacaacttaacttgcttaaaaaaagtcagcgagcctggctggattttagggacaaagaatgtgaattaatccttagtaatgaggacgttcaggatttaagtgacccttattctgaaagtgaatggctcagttgtatgatcatacagaccaatacgcgaactcgccagttgcagctataccgtaactctgaagatttttatccaagccctttgacaagaggataattcacatctttttggcatgttttgttgcaagctattcctgataaataattgcaacaagacatcgagcctttttcactgagttattaaacatactcgcgagcgcgtcgctacgctagcaagcaaaaatgaaacaggaataatcgaaatgggatgttgcgcacagtcaaaataactcaccgtaaataatcatctgctataaataatcactttcatgcaataccagataagctatttttaaacagacacttaccgcacaacaaactaattaaatacaaagaaaggcaacaatcaacttaatgttaatgaaatgttttacatatattaaccacttgtttaatgcggagaatcagtacactattttcttataattacatttgaaattatatgatcaccgggagtgattgattaattatctttactaataatcagactaatatttacctgtttgaccgagttgggattgcgtcgtttctccattaggagtaaagctttaatgtcacctgaagttcacagaataaggaacaggttatgagctatagcaatattcttgtcgctgttgcggttacaccggaaagtcagcaactgctggcaaaagcggtatctatcgccaggccagtaaagggacacatcagtttaattactctcgcttccgacccggaaatgtacaatcaattagctgcgccgatgcttgaagatttacgcagcgtgatgcatgaagaaacgcaaagctttcttgataagttaattcaggatgcggggtatcccgttgacaagacgtttattgcctacggtgagttaagcgaacatattctggaagtatgtcacaagcatcatttcgatttggtgatttgcggtaatcacaatcacagtttctttagccgagcatcctgcagcgcgaaaagagttattgccagtagtgaggtcgatgtgctgttagttccacttacgggagattaaccgctcttacgcaagctttggaaaggtagcaactttatcgcgctgctggctttccgcgcttcgcggaactatctgctttaggtcgctaatgaagcactcctgccagtggttaatatcgtttttcacgataacgtccagcatttctgcatgacgggaaatacgttccgccaggctcatagtcaatgcacgatccagcgcagctgcaacttcgtcacgatcgtaggggttaacaattaacgcgctcgttaactcgtttgccgctcccgcaaattggctaagaacaagaacgcccggattggctgggtcctgagcagcaacatactcttttgctaccaggttcatcccgtcacgcagtggcgtcactaagcccacgtcagagtagcggaatattttcatcagtaatttacggtcaaaatgctgattcaaataataaagcggcgtccagcctaattgcccgtatttaccattaattcgtccagcttcattttcgagctgatgacgaatatcctgataggcttgcacatcaccacggctcgttggtgcaatctgggtataacgaattttaccatgatgctgcggatatttttccagcaacgcttcataggcgagaaaacgctctggcaaacctttggaataatccagccgttcgacagaaaagatattttgtacgtttttcagttccgctttaagttgcgccagttttggcggcagtggcccggcagcctgtttggctatttctttcggttcaatgccgatcgggtagacttctgttcgaaatgctttgccccaggctgtatggctttttgcgctacgtgtcgtgacgcgggtcaggttagaaagacaatccaggaacgccagacgatcgttttctgtctggaaacccagcaaatcataatcacaaagctgttcaagcaaggtgtcatatgtcggcagcgcgttgaagatttccggtgtcgggaaaggaatatgcagaaagaaaccaatgcgattattcactccccgtttgcgtaattcatgcgcaaatggcaacaggtgataatcgtggatccagataatgtcatcgtcttgcaacagcggcagtaatttatctgccagcaacgcatttacgcgtagatagccgtcccaggcaggacgctgaaattgcaccagatcgagccgataatgaaaagcgggccagagaacggcattggagaattggttgtagtattcgtcaaggtcctgttcgctgaggttaaaagaggcccacgtaatgttaccttttttcaccttttttagcggctgatcctcattccctgtttcaccactccagccaaaccacagtccgcctgcggctttcagtgcccccagtatgccaacggcaaggccaccggcactggcggcgtgctcgtctggtggtgcaatccggttagatactacgactaaacgactcatagtcatcactcctgttatttttacttagatactacgactaaagctctcatagtcatcactcctgttattttctcttttttgttgtaatgcggtggttatcatttcaagccagctccagacatccggcacacccgccagtcgccaacttgcctgagttgcacctgtgccaatttttacactcattccgcccagtcggttaacgactgcgaagccagattcatcggttaaatcatcgcccagaaatacgggcgttcgcccgataaagggagcttcctgcataaaagctgcaattgcctcacctttactggtacctctcggtttgatctcgacaacacactttccctgctgtaacgccatttgtggccagatctgagtaatacgttgcgctaatgtcattaatgcgtcttcatgctgcggagcctgacgataatgcagcgcaaaagccatccctttcgcctccagctccgcgccgggatactgagcgatgactgtatgcagttgcacgctaatatcacgcgcaatcgcatccggcagatgaacgatatgtgttttaccattgatgtcacggcgctccgccccatgcacgcccgctaacgggaagcgataaggttttgccagtgcgtcaagctccaccatactgcgcccacttatcaatgccaatgcaccatcacttgcggttgccagtagctgtagtccttgcagaatattgtcaggcacgacgacctgatcgggatgcggtttgatttccgccagcgttccatcaagatcaaaaaaccaggcatatttcgcggatagttcaggggtttcggttaacggttctgtcacccggttctcctccttctcttttcttattgtgttgcgcagaacgcgctttacagacatgtaagtatagacagtgtgacgggggtcgccatttgcaacgaagaacagccaaccgttatggcggttggctatggtgggaaaaaacgctaaattgttgcagaaaaaagcatcagacagtgcgtttcgctttttgcttgtaacggtcgaagatcaccgctgccagcaggattaagccgcgaaccacgtactgcgcgaaaggagaaatattaagcaggttcatggcgttttccacggtgcctaaaattaagatacccgccaccacataactgatttttccgatgccacctttcagagaaacgccacctaaaacgcaggcggagataacaatcagctcataaccaatgctcgtcattggctgcccactggtcatacgactagccagaataattccggctatcgcacttaccaggccactgagaacaaagataataattttggtgcgaacaaccggtacacccgccagacgcgcggcctcttcgttcccgccaatcgccagggtgttacgaccaaaggtggttttattcagcagcaaaccaaagataatcagacacgcgacggtgagccagattggcgcaggcagaccgaaccagttggcgtaaccaagggcaaagaagctttcatcttcgataccgaccgctttaccgtcactaatgatgtacgccagacctcgaacaatctgcatcgttgccaatgtcgtgatcagagcatttattttcagtttggcgataacaaagccattgaccaggccacagagaacgcccagcaacaaccccgctgccacgccaatccacaggctttcagtcaggttaataaccaccgccgtggtgacacccgcacaggcaattacggaggcgacagaaaggtcaaagtcaccggaagcgaggcagaacaacatgccacaagccaccatcccgctcatggaaattgccaggcccaaccctttcatattaatgaaggtggcaaaatttgggacaaaaatggcacaggcgataaagagcaccgcaaacaccaccagcatgccgtactgatcccagatacgcccgaagctgaaactgctcttaggtgcgccagacccgcttgtagaaacagaagacatcatactctccttactcaggcaacagcctggctgactttaggcatcgcaaggctcagtgcctgacgctcatctgcctgctcgtgtaacaattcaccggcgatttcaccttcccgcatcaccacaatccggtcggcaacgccgaggacttcaggtaagtcgctggaggcaaacagcaccgccacgccctgcgccgccagcgcataaattacgttatatatttcgtgcttagcgccaacatcaatgccgcgcgtaggttcatccagcaaaatgaccttcatctcttcgcttaaccagcggcccagaatggctttttgctgatttccgccactgagattcatgatcagttgctccgcgcccggcgttttgatgttgaggctacgaatgtggtgatcggcattgttttcttcccaaccgttgttgattacacaaccgccgagcacatgtttacgtctggcactgatgttgatattgtcgcgaacggagtgcacgggaataatgccttccgctttgcgatcttccgggcagagcatcatgcctgcggcaatggcgtggctcggtttacgaatatcgatcggctgttggtcgatataaacctgaccggcggtgatttgcgtcccgccaaacatgcctttcattaattcgctacgccccgcccctaccagaccaaacagcccaacaatttcaccactgcgaaccgccagacttattggcgtacgcacgcctggtgctttcacagcatcaagacgtaggcgctcctcgccataactacgcggttgccagccgtagatatcgccaatgtcgcgcccgaccatcgcctgcaccagcgcgtcgtggtcaacctgctacatatcggtaaaggttttgacataacgtccatctttaaagacagtaatggcatcgctgagggcaaatatttcttccatacggtgagaaacgtataagattacccgcccctcttttcgcagttcacgaataacgcggaaaagattgtcgatttcacgggcagagagggagctggttggctcatcaaaggcgataattttggcgttacgcgccagcgctttggcgatttcaaccatctgccactgaccaatggagagatatttcagcggcgtgtccgggtcaatatccataccaagatgtttaagttgtaaacccgcctcataattcagcaaactgcgattcacaatgccgcctttatgcggcagctggccgagatagatgttttccgcgacggtcatttccggcacgagatgcagttcctggtaaataatcgccacgcccgcgttaagtgctgcggtcgtgtcggaaaaggacatttcctgcccattaatcactacagaacccgtggttggcgcatagttgccgctgaggatttttaagagagtactttttcctgcgccattttcacccatcaacgcatgaacctgaccggcatagcagtcaaaactaatatccgtcagcgccttaacgccgggaaacgttttaccgatgccgcgaaaactgagatacggggtagactgttgcataacgtctccgtgaatcactggtcgttcacaccccctctgcatcatgcagaggggaatttttccggcaaattacttaccgcctaaaccttttttctccagttcttctttaaagttgtcacgcgtgatcagtaccacgtcggtaacttcggtaaattttggcggttcaacgtcttttgctacccagttgtaaagcatttcgctggatttatagccatgtacgtccgggcttggcagcagggaaccgtagaagccggttgcctgtgctttagacagttcgctcaccgcatccacaccgttaatgccaatgccgatgatatcggccgctttaaagccctgaccttccgtcgcgcgtacgccgcccagcacggtgctgtcgttcataccgacgatcagccaatgtttaacttccggatgttgaaccagcatactgttggcagcgtcaaatgcccccgggatgtcgttagatttggtaggtacctgataaatttgtttttccgggaatccggccgctttcagcgcatccatagatcccgtagtacggcggcgggcggtatccagttcgttggcggtaatcgccatcaccgcgctttctttgacatcccagccacgtttctgcatctctttatacagttcctggccctgacgttcgccaattttagtcgccgccatcatcaccagcggaacggtatccattggcttacctttggcgttaacaaactggtcatccacggcaatgactttcatatcgtagccacgcgctttcgcgacgatggcagagccgagtttggggtccggagtacaaataacgaaaccttttgcgccactggcagccaggctgtcgatcgcgttcaatgttttttcgccatccggcacggcaatcttaataacctcaaaccctaaatccttcccggctttatcggcaaacttccattcggtctggaaccacggctcttccggttgcttcaccagaaaaccgagcttcaggttctccgccatagcggattgactcataacggctgccagaccaatggctgccagggctttagtaaatttgtgcatggttctctccagctttagtgtcgttttgtgtagggcaaaaacgaatgacattcgttaaattaatcggaaaacaaagcattaccttttaactaaaagataagtgactgtgttgacatagttttagcgagaaattaattctccataggagagcaatatcacatcgcagaattacagtgagaacgtgcataaatttagcgggaaaagacataagggaaagccaatttgtcagacaaattgtcgaatgcacagcagattaatccataagattagcctggaaatccttgttgtctttggtacccatgcgggatgtcttctttttaaccagtcaataggccgcattacctggcgttgagtttttgaaatggtgtaataaccgcaactcaaagatgtggaaaatgcacgtcattcatttcgtcattaattatcactgtgctcattaattaacagaacacgtataatgagagccatctcgcaaaaatgaaaaaacgttttataaaatcatcacttcatcatgaattcaaattcattgattaatatcaacaagatacaaaaagcactatcattaaaattcattgcagttacattgatttcatcaatgaaatgtaaaaatatataaacttgatgatttaagcattttcttatacccgttcagacgttattcttatttcagatcatcgtcagaattgactccacgatcacatttcggaccggcagaaaggaattattctgcaaacagtaattatggtgttttgatttatcttgcacctctccacttctggatataaggatattaggtatggcaaccgctggaatgcttctcaaactcaactctcaaatgaaccgcgagttttacgcatccaatctctaccttcacctgagtaactggtgttctgaacagagtctgaacggcaccgccactttccttcgcgcccaggcacagagtaatgtgacccaaatgatgcgcatgtttaactttatgaagagtgtcggcgctacccccatcgttaaagccattgatgttcccggtgaaaaactgaactctctggaagaactgttccaaaaaacgatggaagaatacgagcaacgttctagtacgttggcacagttagccgatgaagcgaaagaactgaatgatgatagtaccgtcaatttcctgcgcgatctggaaaaagaacagcagcatgatggtctgttgctgcaaaccattcttgatgaagtgcgcagtgcgaaacttgcgggtatgtgccctgtgcagaccgaccaacatgttctgaatgtcgtgagtcaccagctgcattgatcatcatcggcgctaatgcattgcgccgatgaaggttttgagaaaccgctgcctcatctgtttgaagcagcggtttttttaatgggattcaccctgtggggtaaacttgagttcaataagcgcgatggctttttggattgcccgcatggtgaccgggtctgcggcggcgggatggttagtaaagtcgatattcttcagctgactggacattttttcacgaacttcaacgggcgcgattacatcgagaacatccagaatttgtttgataaccaactggcaagcaaccacatcagaaaccaattcctgatcggcattcagcggctgggacatcgtaaactcctgatagcattttgaaagccgttatagtagcgacttcacatcttcagcgatagtcacatccaccgtcatcaggacacaaaaaaacctgccggagcaggttttttgttatcggaacatattgcctggcggtacgtctttgaacgtcttgcaatagttattgaacatacttttcaggattttgcgcagtttcatcgcggcactccgaccatttgttatacaggtgttattgtctttgcgcttataatatgacaaccatcacaaaaatcaatctttatgtgatacaaatcacataaatacccctttaatgttataaaaatgataatcaaaaaacagcccccctatttctgacacctacagatggcaagaaatagcgcctgccaggcgtcttttccggccattgtcgcagcactgtaacgcgtaaaatagtgctttctcttactcttctggctggaccatgagacttctgattctgactcttagtttaataacgctggcggggtgtacggttactcgccaagcccatgtgagcgaagttgacgcggcaacaggtattgtacggttagtttatgaccaggcttttttgcagcatgcccataccgatcgttatgtcagtcgcgggatcgccgatcgcgcatgccagcaggaaggctatacccacgcggtcccctttggtcagccagtaggcaactgtagcctttttgcgggttccttatgtttgaatacggaattcactttgagttatcagtgccatcattccgccttccctgtctttctctaaatattttaatcagcgaggggatcttcgctgattaaagaaatagcggtaatgcgttttattcccattcgtatttttaataattgaagtttatattttaccttttgcaaataataaaataacaaattatagtgacgccacagcaacaaatataacctttgtggagcactatcatgctgaaaccagaaatgattgaaaaacttaatgagcagatgaacctggaactgtactctagtctgctttatcagcaaatgagcgcctggtgcagctatcataccttcgaaggtgctgccgcgttcctgcgccgtcacgcccaggaagagatgacgcatatgcagcgtctgtttgattacctgactgataccggcaatttaccgcgtattaataccgttgaatctccgtttgctgaatattccagtcttgatgaattattccaggaaacctataaacacgaacaattaatcacccagaaaattaacgaactggctcatgctgcaatgaccaatcaggactacccaacatttaatttcctgcaatggtatgtttctgagcagcatgaagaagagaaactgttcaaaagcattattgataaattaagcctggcaggcaaaagcggcgaaggtctgtattttatcgacaaagaactctctaccctcgacacacaaaactaatgctctccggcggcaggtttactgccgccgtttcaaatcagtgacggcaaatcttactctgatcggtgctaaaaccgtctttgctaggtataaatttgccttttgctgccagaaacgctaccagctctcccgctgtcatcccttctgcgctgcaggtgtgaaaacgtgcctgttcaccaaaacgcgctttaatcgcagcttccagactggcatgcgtatattgctcgccactttcaatcatcatatttaacacttcatgaccgtgaatagagtccatcgtccctcctcaaaaaaagcctagcgtagcgattgccgcttatgaagactttgcgccagcgcaggactgaatgctttttattgtacatttatatttacaccatatgtaacgtcggtttgacgaagcagccgttatgccttaacctgcgccgcagatatcactcataaagatcgtcaggacagaagaaagcgtgaaaaacagaaccctgggaagtgtttttatcgtggcgggaaccacaattggcgcaggcatgctggcaatgccgctggctgcggccggtgttggttttagcgttacgttaatcttgttgattgggctttgggcgttgatgtgctacacggcgctattactgctggaggtgtaccagcatgttccggcagataccggtctgggcacgctggcaaaacgctatctgggacgctacggtcaatggctgacgggcttcagtatgatgttcttaatgtatgctctgactgcggcatacatcagcggtgccggtgaattgttggcctccagcatcagcgactggacaggtatttctatgagcgcaaccgctggcgtgctgttgttcacttttgttgccggtggcgtggtttgtgtcggaactagtctggtcgatttatttaaccgttttctgttcagcgccaagattatttttctggtggtaatgctggtactactgctgccgcatattcacaaagtgaatcttttaaccctgccgttgcaacaggggctggctctgtctgcaatcccggtgatttttacgagctttggttttcacggtagcgtgccgagtattgtcagctatatggatggcaacattcgtaagctacgctgggtgtttataatcggtagtgcgatccccctggtggcatatattttctggcaggtggcgacgcttggcagcattgatagtacaacctttatgggattgctggctaatcatgctggattaaacgggctgttacaggcgttacgcgaaatggtggcctctccgcatgttgagctggcagtgcatttatttgctgatttagccctcgccacgagttttctcggcgttgcgttaggcttatttgattatctggctgatttatttcagcgtagtaataccgttggtggacggttgcaaactggtgcaattacgtttctgccgccgttggcgtttgcactgttttatccacgaggatttgtgatggcgctgggttacgccggtgtggcgctggcggtactggcattgattatccctagcctgttgacctggcaaagcagaaagcacaatcctcaggcgggttaccgggtcaaaggtggtcgtccggcgctggtggtggtgtttctctgtggtattgctgtgattggcgtgcaatttttgattgcggcagggttgttaccagaagtggggtgatcagatagcctcaaattccttattgggtgccagaattaacgctgacacccaatttggcctcttaatgcaggcagcactgcttaaatttcttaccactaccgcacgggcaaggatcgttacgccccggtttctcttctgctttgatcggttgctgaacagctttttcctgcggatgcgccatccagtacgcatgtagatcaagcgccgccagtcgaatggcatctacgctctcttcaaacgcttctgggctcatcttttctacccgctcgaagttttcctcagtaccgtgcagcgcaatcgcctccagcgctggttttaagctatcgggcaacgtactccagtcagaaagtgccacgccccgcatatagccaaagcaccactcctcaacaatcgtcagctcgctgccatcaacttctcgcaagccgaataacggctcaaactgctccgggaattcgttcagacgctctgcggtatcggccatatgttgaaaagccagattcataaagcgcgtcatctctttctcactcgcccagcgcggcacatagtcagccccaccccacacggcaaccagccactgttccggttcaatctcttgcggagaactcaacaccgccgtcaataaaccgtccagctccgccacatcaaggatggcgtggtcagtgttgtatttggtcagaatatcgtccagccattccaactcactttcgtttaacggtcccgttttcatacgcttttccttgtggatctcaactcgccagcacctatcttacatgccggtccgtatcagagatactttttgagtggctttgctggtgattaaaaattaaggagggtgtaacgacaagttgcaggcacaaaaaaaccacccgaaggtggtttcacgacactgcttattgctttgattttattcttatctttcccatggtacccggagcgggacttgaacccgcacagcgcgaacgccgagggattttaaatcccttgtgtctaccgattccaccatccgggctcgggaagaaagtggaggcgcgttccggagtcgaaccggactagacggatttgcaatccgctacataaccgctttgttaacgcgccaaattcttcaggcctttcagccagacatccgcttgacgccgatgtcttttaaactggagcgggaaacgagactcgaactcgcgaccccgaccttggcaaggtcgtgctctaccaactgagctattcccgcattcatcaagcaatcagttaatcacttgattttattatcgtctggcaatcagtgccgccgttcgatgcgttgcattctacttacctggcgcgatgagtcaacgatatttttcaccacttttgatcgtttgctgaaaattacgccgaaacgatcactgatcaagcaaatctgcacgcgcagcgctcaaatattgcaacatactccacagagtcagtaccgcagccacaaagaaaagtgcaataccggcgtactcaacccaaatgttcggacgccacagcagccatgccaacgccaccatctgggcagtggttttcactttcccaatccaggagacggccacgctactgcgtttacccaactccgccatccattcgcgtagcgcagaaataataatttcacgggcgatcatcgttgccgccggtaatgtcacccaccagctgtgataatgctcggttaccagcaccatggcgatagccacgagaactttatctgccacagggtcaaggaaagcaccaaaccgggtactctggttccagcggcgtgccagaaaaccatcgaaccagtcagtcaccgccgcgacgcagaaaatgagcgcggcggcaaacgggctccaggtgacaggcagataaaagaccaatacaaagaatgggataaggatgacacggaacagtgtaagcaacgtagggatattaaattgcataatgacgggtaactatctgttgtcagtaagattacccctatgttgctacagagacatcaatgtttcaagctccagaagatcttttctgccagaccttggctaatacccggcacttttgcaatttcctcgacgctggcgttacgtaaaccttgcaaaccgcccatatatttcaacaacatttgccgacgttttggcccgacgccttcaatggtttccagggaactggtatttttgaccttcgcccgttttttacggtgcccgccaatcgcgtgatcatgactttcatcgcgaatatgctggataacatgcagcgcgggactatctggcggcaaactaaatccctcaccttccggctcaaagaacagcgtttccagtccagccttacgatctgctcctttggcaacgccaagtagcagcggatgatttttatcccaactgacatccagttcggcgaagacatttttcgcctgcgcaagctggcctttgccgccgtcgataaggatcacatccgggatcttactgtcgtcaatggctttaccataacgccgacgcagcacctgattcatcgccgcataatcatcgcccggcgtgatgcctgtaatgttatagcgccgatactccgcacgcagcgggccgttagcatcaaacaccacacaggaagcgacggtttgttcgcccatggtatggctgatgtcaaagcactccatccgcttcacttccggcaatttcaacacgctggcaagcgcggtcagtcgctggtgaacggtagattgctggctaagtttgctggttaaggccgtcgccgcattggtgcgcgcgagtttcagataacgcgccctatcgccgcgaggtttggtttgaacattaatcttgcgtcccgccagttcactaagggaatcggcgagcagcgttttatcgctaagattaaaatcgagcaggatctcacccggtaaggtgcgcatctggctgccttgtaaatagaactggcctacgaaggtttctaccacctcgctcagttccgtaccgccaggcactttcgggaaatagctgcggctgccgagcactttgccctgacgaatgaacaatacgtggacacaagccatgcccgcatcgaacgccacaccaataacgtcgaggtcgtcgccggtattggaaacgaattgtttttcggtgacgcgtcgcaccgcctgaatttggtcgcgaatacgtgcagcttcttcaaactccagattctggctggcagtttccatacgactaatgagttgcgtaagcacctgatcatctttgccagacaaaaacaggcgcacatactcgacctgctgagcgtattcttcttcactcaccagtccttcaacgcacggtcccagacagcgccctatctggtattgcagacacggacggctgcgattgcgataaacactattttcgcactggcgaatggggaaaatcttttgcagtagcgccagtgtttcacgtacggcatagccattcgggaacgggccgaaatattcacctttggcatgcttcgcaccacgatgcatcgccagacgcgggtgggtatcaccactcaggaagataaaaggataacttttatcatcgcgtagcaaaacgttgtaacgcggctgatagagtttgatgtagttgtgttccagcaacagcgcttcggtttctgtgtgagtaaccgttacatcaatttgctggatctgggcgaccagcgcttcggttttgcggctagcgaggttgctacggaaatagctggaaagccgttttttcaggtctttcgctttgccgacatagataaccgtaccaccagcatcgtacatgcgataaacgcctggctggctggttacggtttttaaaaacgcttttgcgtcaaactgatcactcactgactacttaatgtctccgcattacacagaccatggcgaattgccaggtgagtcagctcaacatcgccatgaatgtttagtttactgaacatacgatagcggtagctgttcaccgttttcggactgagattgagctgttcactgatctcattgaccttctggcccttggtgatcatcagcataatctgcaattcacgttcagacaaactggcaaatgggctttctgttttttctggttcgatctggcttaacgccatttgttgagcgatgtcagaagcaatgtaacgctgcccactatagacagaacgaatcgcactcacgacttcctgcggagccgcgcctttgctgaggtagcccgcagcaccggcctgcatgactttcgctggtaaagggttttctgtatggacggtaagcatgatgattttgacatcagctgtggaacgcgcgattttacgcgtcgcctcaagaccgccaatgcccggcatactcatgtccattagcaccacgtcaacggcatttgtccggcaccacttaacggcgtcttcaccgcagcttgcctcaccgacgacttttataccctttatatcttccagaatgcgtcgtatccctgcgcgcaccagttcgtggtcatcaacaagtagaacgttgatcaaaggaatatctccagaaatagggataacgctactgatagttagtcattcgtatattagcggtttttattgcaactttgaaacgttaaaaatggtgggtattcgatttttctctcgtttttgtcaattcgattgtccacagttatggtcacgcccgtcaccaacggcttaccggatcgtttcacagtaagccctacgatgaaatgtgacaaaaattgactttattcagcaaaaatgaaaatcagcccgctgaatatgtaacattaattaacccgaacaatacgggcaaaaaacattcatgataaaaatatttattggtcattatattaacgtattttatagcactgccgatatcacgctcaaaaaacaaccactgctatttttagcaaagcttatggtatactccgccgccttaacatttttcaccgcaaattttcattgcaacatgacgaggaaaataaatgagtacgcctgatttttctactgccgagaataatcaagaactggcaaatgaagtctcctgcctgaaagcgatgctgacgctgatgctgcaggcgatgggacaagctgacgcgggccgcgtgatgttaaagatggaaaaacagcttgcgctgatcgaagacgaaacccaggctgcagtattttccaaaacggttaagcaaattaaacaagcctaccgtcagtaatataaaaccggctgatagcgtgcctttcagccggtttttgcatctggcacgcaggacagaaaagagatcaaattaagccagtagcggccgcgtaacaggcaacctgggtcttatttggtgcattaatttttttctgcatgtttttctggtggaaattgaccgtattctcagagatactcaaaatcatcgctatctctgcacttgttttcccttccgccgtccacctcagaatttctttttcgcgcttgctgaaattcatctctggcgtcatcactatttcatcatttaaacgcatcagagccatcagactttcgcgcaccagtaactgcatttttaattgcagttcatcactaagaatgggtatttcgcgcgcgctgcaacgggaaaaggacaaaaagcccagcgcccggtttggcagcattaaatactgagtgacaccgcggcgtaaaccatgtgcgcgcgcggcttcccataacggctgtgcttcgctgaataagtcatcattccacattaaatggccctgactaaagttttcagggttcagcaccggatcaattgcgagaaagttttttgcctgataataactaacccacgcctcagggtaattggtgtaaaaagccactttaggtcgagtgaatggtaccgggtggcggacacataagctatagtaatcgtactccagctgctgagcctgaagctcaatttcatggtagacctcttctgcggtctccatcctctgaaaacgcaacagcatcgtgcgacgccagctgaaaaaatccttatcctgcatagtaaaccgcaacgcccttgagagtgagtatcatttataatgataattcaaactatcacataaataagatttatatataatttatattattcaggcaatgaattacttttgcaagccatcgcattctcttatgttattaatgagttatgctgatttgttaagcagttttatcaggcttgaaatggcgtccagccccgacaggtgaatcgtcggggctgattttttcttattattgcagcagaaacttctcgaggaactggcgggtgcgaggctgctcggttccgtaacgtttatcatgttatcctaaggattatccgaaaaataatacctacgaacatcttccaggatactcctgcagcgaaatatttgttttaagctcactcacatatcgcaacatttactttactttaagacaattccaggcaaattatacaacactttacgggatagtaagtccgcctgaaaaatcgcgagagtggcgcattaggtgacccatgttgttccgtttagtcatgatgaaatattcaggtaaggggaattatcgttacgcattgagtgagggtatgccatgagtacgattattatggatttatgtagttacacccgactaggtttaaccgggtatctgttgagtagaggggttaaaaaaagagaaatcaacgacattgaaaccgttgatgaccttgccatagcttgtgatagtcagcgccctagtgtggtgtttattaatgaggactgtttcatccacgatgcttctaacagtcagcgtatcaagctcatcattaatcaacatcccaatacgttatttatcgtttttatggcaattgccaatgttcattttgatgaatatctattggtcagaaaaaatttattgatcagttctaaaagcattaaaccggaatctctcgacgatatccttggcgatattctgaaaaaagagacaacgataaccagctttttaaatatgccgacgttaagtttgagccgaaccgaaagcagtatgttgcgaatgtggatggcaggtcagggaaccattcaaatctctgaccaaatgaatatcaaagccaagaccgttagtagccataaaggtaatattaaacgtaagatcaaaacgcataataaacaggttatctaccatgtcgtccgactgacggataatgtgactaatggtatttttgtcaacatgcgctaacacattctgactggtggtttcccaccagtcaggctgaataagattactctgctttctccacaaagataccgtcctgatgccctgcttcattaaagaaccagatgccgagcgggtagtcttccaggctaaccaggtacattgtgccttcactaaactcctcaactgccagtaccacgccaggacgacgcggaccgccatccgttttgactgttacccgatcattcaccttcatcgttttcctcctgtggctttgtgccagtgtagaacaatttcgtttttctggcagcgccaggcgcgcgcgagtgctgattttctcgacggtctatacttaagagatgccaggcggacttaacgactggcggcaacaacagagtaacggttgcgaggaaagatgatgaaaaccgcaaaagagtacagcgataccgcaaaacgtgaggtcagcgtcgatgtcgatgccctgctggcggcgatcaatgaaattagcgaaagcgaagttcatcgcagccagaacgattctgaacacgttagcgtcgatggacgtgaatatcatacatggcgtgaattggcggatgccttcgaactggatattcatgacttcagcgtctctgaagtgaatcgttgaatgcacaataaaaaaatcccgaccctgagggggtcgggatgaaacttgcttaagcaagaagcacttaaaaaattcgttacaccaggaaatctgatgtgttcatcaccttatccgcaatttttttcgctgacaagaaaatattcgccatatgaatgattaacgctacttatgaatagaaatgtgacgcacgtcaccccttggtggctctggcgtcagcgggatcgctcccgaaaaaatcatctttgataatttgtgcggttttgagaatcatcctggtaagaggagtactgcgcgactatgtttagtattcaacaaccactactggtttttagcgatcttgatggcaccctgctggacagtcatagttatgactggcaaccggcagccccctggctcacccgtttacgcgaagcaaatgttcccgtcattctctgtagcagtaaaacaagtgcggaaatgctgtacttgcaaaaaacgttggggctacaaggtttaccgctgattgccgaaaatggcgcagtgatccagcttgctgagcaatggcaggagatagacggttttccacgcatcatcagtggtattagccatggcgaaatcagcctggttttaaatacgctacgcgagaaagaacattttaaattcacgacttttgatgatgtcgacgatgcaaccatcgccgaatggacgggattaagccgtagccaggcggcgctgacgcagcttcatgaggcgagcgtaacgctaatctggcgcgacagtgacgagcgtatggcacaatttaccgctcgtctgaacgaactgggcttacagtttatgcagggtgcgcgcttctggcacgtactggatgcttctgccggaaaagatcaggctgccaactggattatcgcgacctatcaacaattgagtggcaaacgcccaaccacacttggcctgggcgatgggccaaacgatgcgcccttactggaggtaatggattacgcggtgattgtgaaagggctaaatcgtgaaggggtgcatctgcatgatgaggatccggcccgcgtctggcgaacgcagcgtgaaggaccggaaggatggcgtgaagggctggaccattttttctccgcccgttaagcgttatcgctcgcgaatacccgattacgcccagcctgtttagcgagataaagccgacggtcggccagactctggagttgttcaaaatcataatcaccggtttcctcgctgctgcttacccccaggctggcactgatgcgtatcgtcgtactcttggcgatcaacatctctttttcatttaatttcagtcgaatacgttctgcgacctccgcagcctccgtcagactcgcgcctggcagaatcacacaaaactcctcaccaccgacccgcccggcaacgtcctgcgcacgcaaggaactgctaattaatccggcagcatgagaaagaacacggtcgcccgcctgatgaccaaagcggtcattaatcgctttaaaatggtcaagatcgacctgaatgacagaaaaaggatgttggtgcgtctgacacaatttagcgagcggacgggctttttcgaacagtgcgccacggttatataaacgcgttaaggtgtcgtgccacgcctgccactgcaagctgctttgcagaacatacatgttgctaaccatccggcgaatcacataccaggagatgagtaacatggtggtaaagagcgcccacagcagggttaatgcaatgctgatactgccgaaatcgccgcgcacgccttcgcttaacgtatggacacgcaccagcacaccgtcgaaatggtccagacgttcccagctaacatagcgactgtccatacgaatgccgccccgcgtgtcatgttccattgcctgcgccagcaaggccagttcacgaggatcaaaaatattccctgttggatggtcaggattggaagaggtcaaaaatctcagcttactgtcatagagctgatactcaccatcgaggtttttatcgatggcgtttcttaaaaattgctgcatagtacgcacgggaatactcatccccagcacgccataccagtagttattactgtctaccggaacactgacggtaacctgcggttcagtattgctggcgtgttccggttggctagtgaaccagcgtaccgcgcggtgacgattttctcgttgactatggccaataaaccagggttgggtgacatagccgtaataacgcgttggaacattgcgcgtaaacaaggtcggctgcgtgctaacgtaaaatccggcacggctgacatacatcgcctgttcaaccatgctgctggagttgtgcgctagtcgcagcaagtaaccaacttccagtgcagcggtaatttcattgtcgaggctttcattttcgcgagacaggagattcccctcgctgactaatgcatcgctcacaccattaactggcagagtgcgtcgtcggttgagttcgattttccaggcgtgctcgtcgcgatgctgttcgaactcggttacagcatcacgcagagaggtgaaatccagtggcgctacgagagcttcgcgcatgccattacgtaaaaagatcagtttgtcgacgttatactgcaaatgcttatcgagcgcgttggcaacgttttccagatgattacgctggctggagatataggcatcttccagcaccaccacttcacgccaggtgagcaaggtggaaaaaagcaataccacgataaagcagagattaacgacatgaccaggccccaggcggcgtgcgagttttttcaaccagctctggttttccatttttgtctcgtgctgcaccctgacgactcccaacctgcttttttatgattctggcataacctggcgatagcgtaccgcaaaacagcgataattttataatggtggcatgataagacgcgactatcattcattgcaggcattagcacaccaggccggatgtgatccggcctgatgttaatgataccctttcacacttcttccgcagaacgactcccctcccccggaacaagctcggtttcatgaaaagcttcccgcttgaccccgtaaccgtcataccaacgacactcaaccataccgctggagtatccagtgacaatcatccgcgggccgccctctttaaccgtaacttcctcactaaccataaagctcatactcgcctccttttttcgagtgaaacttgttcaccttagttgaagatggcgaattttgcataatagccagtgcgagtattaatgtgcctgaccgcgcattttctctacggctttcactcccagcaccacgatgccgccgatgataaatccaagaatcagatttaaaacagtcggtaatatcatcgccactactgcactttgctgcccggcgaaatgttcaatggcgtgatgcagcggcgcaattccatgtaccacaatcccaccgccgacgaggaacatcgccagcgtgccgacaatgcttaacgctttcatcagccagggcgcgataatcaataaccctttacctaatgcctgcatcagcgcgctggatttttccgccagccaataccccaggtcatcaatcttaacgataacccctaccagaccgtagacgcccacggtcactaccagcgcgatgccactaagcaccagcacctgattaagcaacggcgcttcggccacaatccccagcgtgatggcgacgatttccgcagacaatataaaatcggtacgaatcgccccttttattttgtccttttcaaacttcagcggatcctgcgccgccagcttctccagacgctgctggctctgcgccggatcttctttatgtttacgcgcctccagcatatgcagcactttctctactccttcaaagcagagaaacgcgccaccaatcatcaacagaggcgtaatcgcccacgggataaacgcactgatgatcagcgccagcggcaccagaatcactttattaatcaggcttcctttcgccacgccccagaccacgggaagttcccggttggcccgcacgccactaacttgttgcgcattgaggcttaagtcatcccctaatacaccggcggttttcttcgccgccagtttgcccatcacggagatatcgtccagtagtgtggcgatatcatcgagcaacgtcagtaaactactcccggccaaaagcattccctctcatttttattgttgaagggtgtaagtatgaagcaaaaacggcagctctgatacttgcttcacaggtcaacatttttttaacaatcaagtgcaattatatctctcgccagcagaatgattttcacgtttactatgaaccacctttttatttccaccgtgagggattatgcgtttccgccagttgttaccgctttttggcgcgctgtttgcgttgtatatcatttggggcagtacctattttgtcattcggattggcgtggaaagctggcctccgttaatgatggcgggcgttcgattcctggcagccggtattttattgctggcatttttgctactgcgcggacacaaactccccccgctacgtccgctgctcaatgccgcgctgattggcctgttattgctggctgtcggtaatggcatggtgacggttgccgaacatcaaaatgttccttccggcatcgccgccgtagtggttgcaaccgtgcccctctttaccctgtgcttcagccgcctgtttggcattaaaacgcgcaaactggaatgggtgggtattgccattgggcttgccggaatcatcatgctcaatagcggtggaaatttaagcggcaatccgtggggcgcgattctgattttaatcggcagcattagctgggcgtttggcagtgtttatggcagccgcattaccttacctgtagggatgatggcgggtgcgattgagatgctggcggcaggcgtggtgttaatgatcgcgagcatgattgcgggtgaaaaactgacggcgctcccttcccttagtggcttccttgcggtcggctatctggcgctgtttggtagcattatcgccatcaacgcttatatgtatttaatccgtaatgtcagtccggctctcgccaccagctacgcttacgttaacccggtggtcgcggtcttgctgggtacgggactgggtggagaaacactgagcaagattgaatggctggcgctcggcgtaattgtcttcgcggtggtactggtcacgttgggaaaatatctcttcccggcaaaacccgtagttgcgccagttattcaggacgcaagtagcgagtaatcaagcgagtaaatgaatcccctgcgtgtcgatctgcgcgctggcaccttcgccgcagatccactcttccagacgctcggtaagcgcttcatccgtcagcttctcgcgcccacgtaacgcgcactcccagacaatcaatacgcgccagccgagttcctgcaagcgactgatatcgcggcgatcgcgctcaacatttttacctatcttctccagccagaactcggttcgagtcgcaggcactttaaacagatagcagtgatgatgatgccagaagcagccatgggtaaatatcacgcagcgatattcatcaacgacaaaatccggacgtccgggcagactggcgtcctgaacgcgaaatgccaggccctgcccggttaacagactggcgaggcgcttctctatcgccgtatcacgcgtggcaatcgcgcgcatatttttgctgcgagtggccttatcgtgaacgtcggccatgttgtgcctcttgctgacgcttagttatcgactacgtcggccatgttgtgcctcttgctgacgcaacgccaccgcctgtttgatttttggctcaagcagttttgccaccgcggcaaagaccggcacgaccacgctgttaccgaactggcgataggcctgagtgtcgctaaccggaatacggaatttcgcttctcccggcgcttcaaaacccattaagcgcgcgcattcccgaggcgttaaccgacgtggacgatgttgctgattcagcggatcgtcaaagtctttctcacccgtggccatatcccagccgcgatcgattaaaatttccgcgccatctttgtaataacgcgcagacagcgtacgcgtgacgctttgcggattgttcggataaaccattccataaccgaagccgttaccgcgcgcctgatgttttttcgcatatcgatagaggtacttccacagcaccggcgtcaggatatatttcgcctcgaccatcgggtccaacagctgcgccagcgtcactcgctgcgcagggaaacattcgctgatatcacgcagggtaaaatcggctttcagattcagatcgcgacgaaaacccaccagcacgatgcgttcacggtgctgcggcagaaaatgtttgccgtcgatgattttcggatcgtctggcccattatcttctgcatcagccacgtcatagcccagttcgtccagcgtctgcatgatgatgcggaacgttttaccctggtcgtgacttttcaggtttttgacgttttcgagcacaaacatcgccggacgacgcgcgtcgataatgcgtaccacatcaaaaaacagcgtgccctgggtatcgcaggcaaaaccgtgcgcccgcccgaggctgttctttttgcttacgccagccaggctaaatggctgacaagggaaaccggccagtaaaacatcgtgttcaggaatgtgttgacgaatatgttccgccgccgcctcatcactcacgccttctttatggctgagggtgatgtcgcggatatcttcattaaaatgatgcgtcgccggatcgcaataatggttggctttataagtgcgtaccgcatgtttgttccattcgctggtaaacacgcactgtccgccaatgctttcaaaaccgcgacggatgccgccaattccggcgaatagatcgataaagcgaaacgcataatgcggatgatgtgccggtggtttgggtaataacgtttgcagatgggcgaactctttctcacttaaacggtgccatgcgctgtcattcgccagcgcacgttttaaaattgccgcgctccagtgattctcacctacaccattaagctgcgccaccaacgttttaacatcataaatttgcagcagtttctccagcattgcctgtgcggcattcccggtgctgtaactatcggttacacttatattttcctgcatagatttcaccggccatctgagatggccgacaggttaacataattacagccatttagggccacgcgctcagccagcggaactaaacgcatctatcaccttgtgatcgacaccttcattctcccccgccagttcggcactgagcttcgccataaactcgactaaaaaatgcgcgttgtgctgcgccagctgcttgcctcttgcggtttgcatggtttgcggtagcttcagcaacttagtctggaaatgatccagcgcgtagcgtttatcatcaagcgggcgatgctgtgcgaacggatcttcaccatcaaacagcgccacgcccaatgccccactaacggcaaacacgcgcgccaggccaatcgcccccagggcttccagccgatccgcatcctggacaattttagcttccgttgttaagggggcgatttgcgcgctgaaactgtgagcggcaatggcatgacaaacggcctcgattttctccgccggaaattgctcgaactcttcacggagcaggcgacgcgtctcttctgccgccaggatactagaacgctgcctttgcggatgatttttcgccaggctcacaatatcgtgaaaataacaggcggttaaaatcaccagcatatcgacatcgtcatctgccgccagcttctgtgccgtagcccagacgcggcgaaaatgacacacgtcatgggccgcgtcctggtgctgatgatggtttttcaaccagttttcgaactgtgcctgccagtgttgtaagtccatacgcgctccgttgccaaagagtcgccaccttagcagtttttattcatagcgtctgctacgtgcgggacgaggtcgggtgtaccaggcaatgctgcctaacaatgccccgaccagagccataaataaaaatccgaccagtgcccctaaccactttcccgcggtagagcctaaatcgctttcaaatccgctcacgggggcatcgggaatccggctcatcacccagatgtaacgcgccattgcccagacgaaatagccacaccatgtatagaaagcccacaaagccagtttgccgccagggctgcgagagagtctctcttccatctttgtgctaccgtattccattttgagataacccggaaaattcagacttagtactattatgtgataaaagtcacatttttccacattggatgagccagtcaagactcaatcattttttgaacaaatagataaattttgcgcaacggcagtgaatacaggaaaaatcgttttgagcgattttatttatctttgatatcggctttattaattcatttaatcaatatattagcactgattacaattatacctttttattattctgtgtcatgatgcttccgttattagccttttatcgtcttgtttatattttttgggccggcatgatgccggctttttttatgccttcattaatgtgcgcctgatcacaccagccgtttggcgcaacaatcattgataccccctatgtttccgctcaactcataacatattgatatacatttataattttcatgaatatttatatttagaattcataattatgaattatattaaatagattagaaacattttgatatcttttaaatacatttgttacatgtaatccttaaaataaaatgaacttcatagaatagtatccaaatgtgctttttttggataacggcacttattgatatattcatgaagattataatcacaagggaatacataatgaaaagaaaagttctggcaatgctggtcccggcgttattagttgctggcgcagcaaatgcggctgaagtctataataaagatggtaataaactggatttgtacggaaaagtagtgggtctgcactacttctctgatgattctggcagcgatggcgacatgtcatatgcccgtatcggtttcaaaggtgaaactcagatcgctgatcaattcactggttatggtcagtgggaatttaacattggcgcaaacggtcctgaaagcgacaagggtaataccgcaacgcgtctggcatttgcaggtttaggctttggtcagaatggtactttcgactatggtcgtaactacggtgtcgtatatgacgtagaagcatggaccgatatgctgccagaatttggtggcgatacctatgctggcgctgacaacttcatgaacggtcgtgctaatggtgttgcaacctaccgtaacaatggcttctttggttaggtcgatggcttgaactttgctttgcaatatcagggtaataatgaaagtggtggaccattcgggcaggaaggttccggtagtggtgatggccgtagcctttccaaagaaaatggtgatggtttcggtatgtcaacatcctacgacttcgacttcggtttaagtctgggtgctgcatatcaaactctgatcgttcagatcgtcaggttggagttggtttaaatgatcgtaaccatagcaacagaaatgctggtggtgaaaccgctgaagcatggactgttggtgcaaaatatgatgctaataatgtgtatttagcagctatgtacgctgaaactcgcaatatgaccccatatggtggtggcgagtttgataatggtgaatcaagatcagccatcgctaacaaaacccaaaactttgaagttgttgctcagtatcagttcgactttggcctgcgcccgtccatcgcttacctgcaatctaaaggtaaggatttaggcggttgggctcatgacggcaacggcgacccacgttacaccaataaagatctggttaaatacgttgatattggtgcgacctactacttcaacaaaaacatgtccacctatgttgattacaaaatcaacctgctggacaacgacgatgacttctacgaagcaaacggcatcgctaccgatgatatcgttgctgtgggcttagtctaccagttctaatcagtcaactcgctgcggcgtgttactgtaaaactgaacactagcctgagttcgtccctcatcgaactcaggcttttttattggcatttcatctccatctgcggcacacgcaattgccgaagcatatcgatacagcaccttaccctgcccctcctggcacaataacatcaaccagctactcttcaagctaacacccaaatgcatttctttatgaattaatccgtaacaaacacgcttcccatatagaaatatttgcaaaaatagtgcatgaaataagctttttctctaccaatccgggatataaatattcatcagcaccacaatattccacagcactaaatctctccccgccaccccgtacctctgataatggtctaaaatcattgaagccacttgcgacgacgttgctcaataaggaaaatttggcgtgaataatattcaacaccagtgcagcatcatcattacatacttacagccgccgactaccgctttcgatatattgactcaattttccagcctggttaaaaatagcgaccagctcagtcgcaaatatagtgactaccctaactaagcaacaataaggaatacactatgactgttcaaacaagtaaaaatccgcaggtcgatattgctgaagataatgcattcttccctagtgaatatagccttagccaatataccagtcctgtctctgatcttgatggcgtggactatccaaaaccttatcgcggtaaacataaaattctggtgatcgccgcggacgaacgttatttgccgaccgataacggaaaactgttcagcaccggtaaccatccgattgaaacgttgctgccgttgtatcatctccatgctgcaggtttcgaattcgaagtggcgaccatttccggtctgatgaccaagtttgaatactgggctatgccgcacaaagatgaaaaagtaatgccattctttgagcagcataaaagcttgttccgcaatccgaagaaactcgcggatgttgttgccagcctcaacgctgatagcgaatatgcagcaatctttgttcctggtggtcatggcgcacttattggtttacctgaaagccaggacgtggctgccgctttacagtgggcaatcaaaaatgaccgttttgttatctccctttgccacggcccggcggcttttctggcgcttcgccacggcgataacccactgaatggttattccatttgcgcattcccagacgccgcagacaaacaaacgccagagattggctatatgccgggtcatctcacctggtacttcggcgaagaactgaagaaaatgggcatgaatatcattaatgacgacatcaccgggcgagtacataaggaccgtaaacttctcaccggcgacagtccttttgcagcgaatgcgttgggtaaactggcggcgcaggaaatgctggcagcttacgcgggttaatccctgttacgtttgaatgtaagcgcataatcaatcgcggccgcgttagtactcacgacgtggctgcgttttttcacggttaatttatggcgtactgaagccctatgttaatttctttgcggtaacgtaatccggaacacattatgcttattgagatagtgatacgtagcacttcccccatgcaattcggcaatcgctttgactaaagaaaggcctagtccctgacctacggaatgacggctattatctccccgccaaaatctacggaagagtttttcaggctcattaattttcgttccagggctggcgatatcaatattaagatagctgttggtatcaagaaaactggttatatgaatacggcttttttctgggctatatctaatggcattaacaataagattgcttaacattcgttgtagtaaaattttatccgcaaagatttgctgattgcactcgaccttaaagcaaatctctttctcgtcactaaggtattcaagatagtccaacaaattttcgacttccttattgagagaaaggctgtccagtttcaccaaaacattgtttttatctgccctggcaagaaacagtatgttctctgttaaccggctaatattttccagctcttcaatgtttccggcaattgttttttgatattcagcgatacttctggtttgactgagcgtaacctgattctgacccagtaatgcattaattggcgttctaagttcatgagcgagatcgtcagcaaactgacttagacgctcaaaatctttgactaaagcatgatgcattttattcaacgcctgcccaagaggttttagttctctcggtaatgcgctaacctcaacaggctctcggctatcgttataattcagcgcttccgttacaccactcaactttttgatctctcgtaatcccgttctgattaacagcggacttaatacactgcaaagtacaatggcgacaatgcaaattataatgctattaattttatactgttcaagcatgttatgtctggcactagccaatttagccacagtaaccgttaaacttgggctaacttcatcaatattaattcgtaaagcatctatctctgtatcattaataatgcttctgtaaatgccagctgcgctgattgtctcactagcaggtatgttatttaacatgccatcactgacatttgtccggttaacaattttattgatgctatcaccatgaataatcaagatatcctgactaacatccatcatccggttaaagtacacaggtaacgtatctggatttaccccatcaattaacaactgcttgatctgcgctgtccggttaatgagtgttgtatcatcgcgccatttcaactcacttgccaggccattatagagagtccagacaattccggcgccagcaacagacagtagcaatataaaaagcaaggttaaacggacggttatagatagtcttttcattatttttttaccgctacgaaactatagcccatcccccggattgtggcaattagcttttcaggaaaaggatcatcaacttttgcgcggagcctgcgaatggcgacgtccaccgtattggtatcactatcaaagttgattccccaaatttcactcgcaataaccgttctgggtataatttcgccagctctggaggccagtagccaaagtaactgaaactccttgcgcgtcagtgtaatactgatattgtccctgctcacactatgactaacagagtccattcttaagccgctgatttctaatgtactattcaaagcgtgatgttgccttaattgtgcccgaacccttgccagcaactcagaaaaactaaaaggttttaccagataatcatttgccccactgtccagccctctgactctgtcatcgacagaatcccttgcagtaaggcaaataacaggggtttgctttgctgttcttaacgtttgtaagatctgccagccatccatacccggaagcataatatccagaatgatcaatgcataatcatccttcagcgcaagataaagcccatctctgccatcagaaacggcatcgatgacataacccgcttcggaaagcccctgcgttacccattcctgggtcctttgattatcttcaataagtagaatcttcatgaaaataatatgccataaatcatatgttatagaaacagcctggttcattacaaaattgtaatgctgctgtaaggttaccctggacgctttttcgctatcctcaaaactcattcacatgacaaggatataaacatgttaaagcgttatttagtactcagcgtagcaacggcagcatttagtttaccttctttggttaatgccgcacaacaaaacattcttagcgtgcacattttgaaccagcaaacaggaaaacccgctgctgacgtgacagtcactcttgaaaagaaggcggataacggctggttacaacttaataccgccaaaacagataaggatggacgaattaaggcactgtggcccgagcaaactgcaactacgggcgattaccgtgtcgtatttaaaaccggggactatttcaagaaacaaaatcttgaaagtttcttccctgagatccccgttgaatttcatattaataaagtgaacgagcattatcatgtgcctttattacttagccaatatgggtatagtacctatcgtggcagttaatgcataaatatgtaaaagcagatctctgctactgttagggaggacactccctgacagattaacagtaaacggctcttgctggctaacgacaaaaaagtgtgatggcttatgaaaaagaatcaatttttaaaagaaagtgatgttacggccgagagcgtattctttatgaagcgtcggcaggtgttaaaagcactgggcatcagtgcaactgcactttctttgcctcacgctgcgcatgccgatctgcttagctggtttaaagggaacgatcgcccgcccgcccccgccggaaaagcgctggagttcagcaagcctgccgcctggcaaaataacctgccactgacgccagcagataaagtttccggttataataacttctatgaattcgggctggataaagccgatcccgccgctaatgctggtagcctgaaaaccgatccatggacactgaaaatcagcggcgaagtggcaaaaccattgaccctcgatcatgatgacttaacccgtcgcttcccgctggaagagcgtatttatcgtatgcgctgcgtggaagcgtggagcatggtggtgccgtggattggttttccgctgcacaaattgctggcgcttgccgaacctaccagcaatgcgaagtatgtcgctttcgaaacaatttatgcaccggaacagatgccaggccagcaggaccgctttatcggcggtgggctgaaatatccttatgtcgaaggattgcgtctcgacgaagcaatgcatccgctcacactgatgaccgtaggtgtttatggcaaggcgttaccgccacaaaatggcgcgccggtgcgactgattgtgccgtggaaatatggctttaaagggattaaaagcatagtcagtattaagctgacccgcgagcgtccgccaaccacctggaatctggcagcgcctgacgaatacggtttttacgccaacgttaatccgtatgttgatcacccgcgctggagtcaggctaccgaacgatttattggtagtggcggcatcctcgatgtacagcgccagccaacgctactgtttaatggttacgccgcccaggtggcaagcctgtatcgtggcctggatttgcgggagaatttctaaatgcgtctgacagcaaaacaggtgacatggctgaaagtttgcctgcatcttgccggattgttgccgtttctctggctggtctgggcgatcaatcacggtggactgggtgccgatccggtgaaagatattcagcattttactggtcgcactgcactgaaatttttgctggcgaccttgttaatcacccctctggcacgctacgcaaaacagccgttattgatacgcactcgccgcctgttaggattatggtgctttgcctgggcgacactgcatttaacaagttacgcattgctggagctgggcgtgaataatctggcgttattaggtaaggagttaattacccggccttatttaacgttaggtattatcagctgggtaattttgcttgctttagcgttcactagtacccaggcgatgcagcgaaaactcggcaagcactggcaacagttgcataatttcgtctatcttgtcgcgattctggccccaatacattatctgtggtccgtgaagattattagtccgcagccgctcatctacgctgggctggctgtactgcttttagccttacggtataagaagttgcgttccctttttaaccggttacgcaagcaggttcacaacaaattatctgtataacttcatattgccgacaaagtacgcgttatccctgccggatgtggcgcgagcgccctatccggcatacacagatcgcatcaggttatgtttcgtttgtcatcaacctcaaatcaccaaaataatttattttatttcaataagatagataagtagaactgagaaagccatgctctcgtttcctaagagttgttgcattttgctatatgttacaatataacattacacatcatatacattaactctggaggaaactgttttggcgattcgtctttacaaactggctgttgctttaggtgtctttattgttagcgctcctgcctttagccatggtcatcacagtcacggcaaacccttaacagaggtcgaacaaaaagctgctaatggtgtttttgatgatgccaatgtacaaaaccgaacgctcagtgactgggatggagtctggcaatccgtttatcctttactgcaaagtggcaaacttgaccccgtctttcagaagaaagcggatgcagataaaactaaaacatttgctgaaattaaagattattatcacaaaggttatgcaacagatatcgagatgattggcattgaggacggcattgttgaattccatagaaataatgaaacaacaagctgtaaatatgattacgatggatacaaaatactcacctataaaagtggcaagaaaggcgttcgttacttattcgaatgtaaagatcctgaaagcaaagcccctaaatatatacaatttagcgatcatataattgcaccacgaaaaagttctcattttcacatttttatgggtaatgatagtcagcaatctttattaaatgaaatggaaaactggccaacgtattatccatatcagttgagtagcgaagaagtggtcgaggaaatgatgtctcattgagtattctcatgataacgcctcgatgccgctttagtaagttatcataactgccactggtccatccacaaacgccactgaacgcaagctagctacagacacgctcatcactatgacgtgtctgtatattaataagctaacccgcattgagttaaccaataacggattccatacacaatacggccaacagagaaagatacctgtgctcacgccattgcttatattggctggttacaatatgcactatcaattttttaaataacaaattattaaaaccacatctgtataaggaatttttaaggttcgtgggatagcttgactgtgaaaatcacaggagctacaaaaatgaaccgattcagtaaaactcaaatttatttacattggataacgctgcttttcgttgcaataacctatgccgcgatggaactccgtggctggtttcctaaaggtagtagtacttatctgctgatgcgagaaacacattacaatgcgggtatattcgtttgggtgttaatgtttagtcgcctgattataaaacaccgttatagtgatccttctattgtgccaccgccacctgcctggcaaatgaaagcggctagcctaatgcacatcatgctttatataaccttccttgcacttcctctgctggggattgctttgatggcttacagtggaaaaagctggagtttccttggtttcaatgtgtctccctttgttaccccaaacagcgaaattaaagcactgataaaaaatattcacgaaacctgggcaaatataggctactttttaatcgcagctcacgctggcgcagcactctttcatcactacattcagaaagataatactctgttacgaatgatgcctcgccgcaaataagtcgatccccttacaaggaaatgtgaaccatggacatcaacgcgtcataaatgtttacgcaagtgcacaatgcaccctttccactatcaacaaggaggagcagaaactgtgtaaatcgtacaatggtaagacttatcaaaaatacaggttaattttggtatttaaaccttttttacttgttagtatgatacaaaggctttcaaaaaagctgcgaaattcaacaactcttggaaattatggactttgtcccgcggctttaatctgacggccgcgttccttttttgactcaattattgaacccttctctacgcaacttcagttcccaccaccaactttgcggcagtttcataggatgaatgtctaaaagaataatggtgagcgataagaaaacgactgaataactgcacattttcgctcgaaagcttcctgtcagatccatagcgaatcaagtgctgaatgtcacagtatcgaacagaaaacagtgacgatctaacccttcaagaatattctacgattgttctgtttaggaaaagaaaggcgggaagtcgggagataagtcattgataaaggttcagatggttgccatgatgccaggaaatttggcattttaacagtccctgtccgtgcaattttgttcaagtgacgagtttgcgagcaaaacgatgattaagtggccctggaaagtacaagaaagtgcacatcaaactgcccttccctggcaggaagcactaagcatcccccttttaacgtgtctgacggaacaggaacaaagcaaattagtcactcttgccgaacgttttttacagcaaaagcggcttgttcctttacagggctttgaactggatagtttaagaagctgccggatagcacttctattttgcctacccgttctggagttaggactggaatggctggatggttttcatgaagtcttaatttatcctgcgccatttgtggtcgatgatgaatgggaagacgatatcggtctggtgcataaccaacgtattgttcagagtggtcagagctggcagcaagggcctatcgttttgaactggttggatatacaagattcttttgatgcttctggttttaacctgattattcatgaagtcgctcataagctggacacccgtaacggcgatcgcgccagcggagttccctttattccgttgcgtgaggttgctggctgggaacacgatcttcatgctgcaatgaacaacattcaggaagaaatcgaattggttggcgagaatgcggcgagcattgatgcttatgcagccagcgatcctgctgaatgttttgccgtactttctgaatatttctttagcgccccagaactttttgctcctcgtttccctagtttgtggcaacgtttctgccaattttatcaacaagatcctttgcagagactgcatcacgctaatgatacagacagctttagcgcgacgaatgttcattaattaacaactttgcagattaattaaccaattgaaatgacttatgaaatttagtgttgacagacaaggtaccgctaagtaatattcgccccgttcacacgattcctctgtagttcagtcggtagaacggcggactgttaatccgtatgtcactggttcgagtccagtcagaggagccaaattctaaaaattcgcttttttagcgcaatgtcactgaccttagttgaacattgttttttaacggatagcgggtttttaacatcttaagcgccctcgacctttatggttgagggcgttttgctatgaacgccatcaccattttcccctcgattataaaacttgagttattcagtagtctcccctcttgcaactcacacccaaaactgcctaacgaaaagttattaattttcaatcatattgctatcagtatttacattttttcgctgtgctagaaagggcgcatttatgttagctcgtagtgggaaggtaagcatggctacgaagaagagaagtggagaagaaataaatgaccgacaaatattatgcgggatgggaattaaactacgccgcttaactgcgggtatctgtctgataactcaacttgcgttccctatggctgcggcagcacaaggtgtggtaaacgccgcaacccaacaaccagttcctgcacaaattgccattgcaaatgccaatacggtgccctacacccttggagcgttggaaagcgcccaaagcgttgccgaacgtttcggtattagcgtggctgagttacgcaaactcaaccagtttcgtacgtttgctcgaggttttgataatgtccgccagggtgatgaactggatgtcccggcacaagttagtgaaaaaaaattaaccccgccgccgggtaatagcagtgacaacctcgagcaacagatagccagtactagtcagcaaatcgggtctctgctcgccgaagatatgaacagcgagcaagcggcaaatatggcgcgtggatgggcctcttctcaggctagtggcgcaatgacagactggttaagccgcttcggtaccgcaagaatcacgctgggcgtggatgaagattttagcctgaagaactcccagttcgattttctccatccgtggtatgaaacgcctgataatctctttttcagtcagcatactctccatcgtactgacgagcgtacgcagattaacaacggcttaggttggcgtcatttcactcccacatggatgagcggcatcaacttctttttcgaccacgatcttagccgttaccactcccgcgccggcattggcgcggagtactggcgcgactatctaaaattaagcagtaacggctatttgcgactgaccaactggcgcagcgcacctgaactggacaacgattatgaagcacgcccggccaatggctgggatgtacgcgcagaaagctggctacccgcctggccgcaccttggcggtaaactggtctatgaacagtattatggcgatgaagtggccctgttcgataaagacgatcggcaaagtaatcctcatgccataaccgctggacttaactatacccccttcccgctgatgaccttcagcgcggagcaacgccagggtaaacagggcgaaaatgacacccgttttgccgtcgattttacctggcaacctggcagcgcaatgcagaaacagcttgacccgaatgaagtcgctgcacggcgtagccttgcaggcagccgttatgatctggtggatcgcaacaacaatatcgttctggaatatcgcaaaaaagaactggttcgcctgaccctgacagaccccgtgacagggaagagtggagaagtgaaaagtctggttagcagcctacaaaccaaatatgccctgaaaggctataacgtcgaagccaccgcactggaagctgccggtggcaaagtggtcacaacgggtaaagatattctggttaccctgccggcttaccggttcaccagtacgccagaaaccgataacacctggccgattgaagtcaccgccgaagatgtcaaaggcaatttgagcaatcgtgaacagagcatggtggtcgttcaggcacctacgctaagccagaaagattccagcgtaagcttaagtacccaaacattgaacgcggattcccatagtaccgccacactgacttttattgcgcatgatgcagcaggtaatcctgttgtcgggctggtgctcagcacgcgtcacgaaggtgttcaggacatcaccctttctgactggaaagataatggtgacggaagctatacccagatcctgaccacaggagcgatgtctggcacgctgacgctgatgccacagctgaatggtgtggatgcggctaaagcccccgccgtggtgaatatcatttctgttagcagttcccgaactcacagcagtattaagattgataaggaccgttatctctccggcaatcctatcgaggtgacggtagaactgagagatgaaaatgacaaacctgttaaggaacaaaaacagcaactgaataacgcagtcagcatcgacaacgtgaaaccaggagtcactacagactggaaagaaaccgcagatggcgtctataaggcgacctataccgcctataccaaaggcagtggacttactgcgaagctattaatgcaaaactggaatgaagatttgcataccgctggatttatcatcgacgccaacccgcagagtgcgaaaattgcgacattatctgccagcaataatggtgtgctcgccaatgagaatgcagcaaacaccgtcagcgtcaatgtcgctgatgaaggaagcaacccaatcaatgatcataccgtcacgtttgcggtattaagcggaagcgcaacttccttcaacaatcaaaacaccgcaaaaacggatgttaatggtctggcgacttttgatctgaaaagtagtaagcaggaagacaacacggttgaagtcacccttgaaaatggcgtgaaacaaacgttaatcgtcagttttgtcggcgacagcagtactgcgcaggttgatctgcagaagagcaaaaatgaagtggttgctgacggcaatgacagcgtcacaatgaccgcgaccgtccgggatgcaaaaggcaacctgctcaatgacgtcatggtcactttcaatgttaatagtgcagaggcgaaactgagccaaaccgaagtgaatagccacgacgggatcgccacagctacgctgaccagtttgaaaaatggtgattatagggttacggcctctgtgagctctggttcccaggctaatcaacaggtgaattttatcggtgatcaaagtactgctgccctgaccctcagtgtgcctagtggtgatatcaccgtcaccaacacagctccgcaatatatgactgcaaccttgcaggataaaaatggcaacccactaaaagataaagaaatcaccttctctgtgccaaacgacgtcgcaagtaagttcagcattagcaacggaggaaaaggcatgacggatagtaacggggttgcaatcgcctccctgaccggcacgttagcgggcacgcatatgatcatggctcgtctggctaacagcaatgtcagcgatgcacagccaatgacgtttgtggcggataaagacagagcggttgtcgttttgcaaacaagcaaagcggaaatcattgggaatggcgtggatgagacaactctgacagcaacagtgaaagatccgagcaatcatccggtggcggggataacggtaaacttcaccatgccacaggacgttgcggcaaactttacccttgaaaataacggtattgccatcactcaggccaatggggaagcgcatgtcacgctgaaaggtaaaaaagcgggcacgcatacggttaccgcaacgctgggtaataacaataccagtgatagccagccggtaacatttgtggcggacaaagccagcgctcaggttgtcctgcagataagtaaagatgagatcacaggtaatggcgtcgatagcgcaacgctaactgcaacggttaaagatcagttcgacaatgaggtgaataatcttccggtaacattcagcagtgcctctagtggactcaccctgaccccgggagtaagtaataccaacgagtctggcatcgcgcaggccactctcgcaggcgttgcctttggtgagaagacggttactgcaagtctggctaataatggtgccagcgacaacaaaactgtgcattttattggcgacacagcggcggcaaaaattatcgagttggcgcctgtcccagacagcataatcgccggtaccccgcagaacagctccggcagcgtcatcaccgccacagtcgttgataataatggctttccggtgaaaggtgtgactgtgaacttcaccagcaacgcagcgacagccgaaatgacgaacggcggtcaagccgtgacgaacgaacagggtaaggctaccgtcacttataccaatacccgctccagcatagaaagtggagcgagaccggataccgttgaggccagtctggaaaatggtagctccacgcttagcacaagtattaatgtcaacgctgatgcgtctacggcacatctcaccttgctacaggcactttttgatacagtctccgcaggcgagacaaccagtctgtatattgaggtgaaggataattacggcaacggtgtcccccagcaggaggtaaccctcagcgttagtccaagtgaaggcgtgacccccagtaataacgctatatatactaccaaccacgacggcaatttttacgcaagctttaccgctacaaaagccggggtttatcaattgacggcaaccctcgaaaatggcgatagcatgcaacaaacagtgacctatgtgccgaacgtcgcgaatgctgaaatcacgctggcagccagcaaggatccggtgattgccgacaataacgatctcacgacactaacagcaacagtcgctgatacagagggcaatgcgatagccaacactgaggtaacatttactctgccggaagatgtgaaggcgaacttcacgctgagcgatggcggtaaagtgattactgatgctgaaggcaaagcgaaagtcacgctgaaaggtacaaaagcaggcgctcatactgttacagcaagcatgactggcggtaagagtgagcagttggtggtgaactttattgcggatacgctcactgcgcaggttaatcttaacgttaccgaggacaattttatcgctaataacgtcgggatgaccaggctgcaggcaacagtgactgatggaaacggcaacccgttagccaatgaggcggtgacattcacgctaccggcagatgtgagcgcaagctttactctcggacaaggcggttccgccattactgatatcaacggcaaggctgaagttacactgagcggtacaaaatccggcacctaccccgtgacagttagcgtgaacaattatggtgtcagtgatacgaaacaggtgactttgattgccgatgctggtaccgcaaaactagcctccttaacctctgtatacagtttcgtcgtcagcacgaccgagggcgcaaccatgacggcaagcgtcactgacgctaacggcaacccggtagaaggcataaaagttaatttccgcggaacctccgtcacgctaagcagcaccagcgttgaaacggatgatcggggtttcgctgaaattcttgtgacaagcaccgaggtcggactgaaaacagttagtgcctctctggcagataaacctactgaagtcatcagccgattactgaatgccagtgcagatgttaattctgcgacgattaccagtctggagataccggaaggtcaggtaatggtcgcacaagacgtagcagttaaagctcacgttaacgaccagtttggcaacccggttgcgcatcaacccgtgacattcagtgcagagccatccagccaaatgatcatcagccagaatacggtctctactaatacgcagggtgtagccgaggtcaccatgacgcccgaaagaaacggtagctatatggtgaaagcatccctgccgaatggagccagtcttgagaaacaactggaggctattgatgaaaaactgacactcacggcgtccagtccgcttatcggtgtctatgcccctacaggcgctactctgacggcaacgctaacctctgcaaatggcactccagtggagggtcaggtcatcaactttagcgtaacgccagaaggggcgacgttaagtggcggaaaagtgagaactaactctagtggtcaggctccagtcgttttgaccagcaataaagtcggtacatatacggtgactgcatctttccataacggcgtaacaatacagacacagacaaccgtgaaagtcactggcaacagtagcaccgcccatgttgctagctttatcgctgatccaagcactatcgccgccaccaacactgatttaagtaccttaaaggcaacggttgaggatggcagtggtaacctgatcgaaggtctcactgtgtacttcgccttaaaaagcggctctgccacattaacgagtttaacagcggtgaccgatcaaaacggaatcgcgacaacaagcgtgaaaggagcgatgacaggtagcgtcacggtaagcgcagtcacgaccgctggtggaatgcaaacagtagatataacgctggtggctggcccggcagacaccagccagtccgtccttaagagcaatcggagtagtctgaaaggggactataccgatagtgctgaattacgtcttgttctgcacgatataagtggcaatccgatcaaagtttctgaagggatggaatttgtgcaaagtggtactaacgtgccctatataaaaattagcgcaattgattacagtctaaatatcaacggtgattacaaagccactgttacaggaggcggagagggtatcgcaacgctgatccctgtattgaatggtgttcatcaagctggtctgagtaccacaatacaattcactcgcgcagaagacaaaataatgagcggtacagtaagtgtcaatggtactgacctaccgacaactacattccctagccaggggttcaccggggcgtattatcagttgaataatgacaactttgccccaggaaaaacggcggctgattatgagtttagtagctctgcctcctgggtcgatgttgatgctaccggtaaagtgacatttaaaaatgtcggcagcaatagcgaaaggattacggcgacgccaaaaagtggaggccctagctatgtatacgaaatccgtgtgaagagttggtgggtgaacgccggcgaggctttcatgatatacagccttgctgaaaatttttgcagcagcaatggctacacgctccccagagcaaactatttaaaccactgtagttcccgaggcatcgggagtctgtacagtgaatggggagatatggggcattacacgactgacgctggttttcaaagtaatatgtattggagttctagtcccgcaaacagtagcgaacaatacgtagtttccctggcaacaggtgatcaaagcgtatttgaaaagcttgggtttgcttatgcgacatgttataaaaacctgtgattttccgttataatttcttaaagagtgttccattcggggcactcttttttacattccctctacagaactagcccttctctcacagaaaatgaataaataaaaatgcggcaccgccagaatcgcgttcgatgtgactatgatcattttcggtgagtactgctttgatctaaaggctggttttctgtgatgattgaccagcctcagagtattgatgacaccaccgttcataacagatcggcattactatgcataagtactgtctcatattctcgccaaaacactttttaatgcctttgcgaattcatccagacttatattgtcaattttttgcccaacgacgactgactccgagacatcggccattgcgggccatcgcgttttgtaatcagcataaattgcaacaacaggggtattataggcacttgccatatgtaatattgaggtgtcaggagttattgcgatataagcatcttttatgattgctgctgaacgtttaatcgagggtggtaaggataaacggtagacattattataacaatccactaatgccctggctttatcttcacctttgggtccatgaacgatcactattggtatatctgtttcactttaaatttttgctattagattttctgcaatcgataatgaaaatgtacgttcctgcgagctaccttctaaattgaacgcaatgtaagatcctaacgatcgcatttcctcgcgcacctcatcgagtacatcctcacttagtggcaattcatatattggcctgactgctggaaaacccgcctcacgcatcataaatgcccatgtcataggtacgggagcccggagtttctgatccatactggacgcgttcttgcacaaaggggagaagcaattcatggttataccaacaacctgaaaattcgtttttgctttcaactgactgataaataacatcgttttcaggttctttttacgcatcccctcaatgcaaagatccggcgtaccgtattgctgtgttatgttctttgctaaatcttttatttcttttaatgttgcgtgatcctgcatagtcattgtgactaatgttaatttagtctgttcaagtttaagcgcattaaagacttctaaattaattgtcgacgttacaattaaaagatgcttaattttatgcaattcaagcgcccgaataacaggaaagatggccatagcatcgccaatctgatcgggaatatggatgacaacaaagtctgttttttcaatattgaaattataagctttataatcgtagtaactaaatgcaatacgtctcaacaatgatgctaaaaacatacctaacctcgcctccctactggttataatgcaatgcagtctatcagactcatcagggtgccattttgtgcatatgcggacttttatgtttcatatctctaacctgtgggtcctctgcttaatccttaaacaacaccagcaactcctgcgctttcatcttccatcgaatttttcatgttgccgctaatcagccataaaatcatttgcagatgcgctctgtcgaggtagtctcataaggttcgtttatagatcgacggcaatgtgagttaccttttccatactaattataaaaagacagtacaaacaggatcattatggactccacgctcatctccactcgtcccgatgaagggacgcttagcttaagtcgcgcccgacgagctgcgttaggcagcttcgctggtgccgtcgtcgactggtatgattttttactctatggcatcaccgccgcactggtgtttaatcgcgagtttttcccgcaagtaagcccggcgatgggaacgctcgccgcatttgctacctttggcgtcggatttcttttccgtccgctcggcggtgtcattttcggtcactttggcgaccgactgggacgtaagcgcatgttaatgctgaccgtctggatgatgggcatcgcgacagccttgattggtattcttcctagtttcagcaccattgggtggtgggcacctattttgctggtgacactgcgtgccattcagggatttgcagtcggcggcgaatggggaggcgcggcgttgctttccgttgaaagtgcaccgaaaaataaaaaagccttttacagtagcggtgtacaagttggctacggtgtaggtttactgcttagtaccggactggttagtttgatcagtatgatgacgactgacgaacagtttttaagctggggctggcgcattcctttcctgtttagcatcgtactggtactgggagcattgtgggtgcgcaatggcatggaggagtccgcggaatttgaacaacagcaacattatcaagctgccgcgaaaaaacgcatcccggttatcgaagcgctgttacgacatcccggtgctttcctgaagattattgcgctacgactgtgcgaattgctgacgatgtacatcgttactgcctttgcacttaattatagtacccagaatatggggctaccgcgcgaacttttccttaatattggtttgctggtaggtggattaagctgcctgacaattccctgttttgcctggcttgccgatcgttttggtcgccgtagggtttatatcacaggtacgttaatcggaacgttgagcgcatttcctttctttatggcgcttgaagcacaatctattttctggatagttttcttctccataatgctggcaaacattgcgcatgacatggtggtgtgtgtgcaacaaccgatgtttaccgaaatgtttggtgccagttatcgctatagtggcgctggagtcggttatcaggttgccagtgtggttggcggtggatttacaccttttattgccgctgcactcatcacttactttgccgggaactggcatagcgtcgccatttatttgctggctggatgcctgatttccgcaatgaccgctttgttgatgaaagacagtcaacgcgcttgatagcctggcgaagatcatccgatcttcgccttacacttttgtttcacatttctgtgacatactatcggatgtgcggtaattgtatggaacaggagacacacatgaataataagggctccggtctgaccccagctcaggcactggataaactcgacgcgctgtatgagcaatctgtagtcgcattacgcaacgccattggcaactatattacaagtggcgaattacctgatgaaaacgcccgcaaacaaggtctttttgtctatccaagtctgaccgtaacctgggacggtagcacaaccaatccccccaaaacgcgcgcatttggtcgctttacccacgcaggcagctacaccaccacgattactcgccctactctctttcgtagctatcttaatgaacaacttacgttgctgtatcaggattatggtgcgcatatcagtgtgcaacccagccagcatgaaatcccttatccttatgtcatcgatggctctgaattgacacttgatcgcagtatgagcgctgggttaactcgctacttcccgacaacagaactggcgcaaattggcgatgaaactgcagacggcatttatcatccaactgaattctccccgctaagccattttgatgcgcgccgcgtcgatttttccctcgcacggttgcgccattataccggtacgccagttgaacattttcagccgttcgtcttgtttaccaactacacacgttatgtggatgaattcgttcgttggggatgcagccagatcctcgatcctgatagtccctacattgccctttcttgtgctggcgggaactggatcaccgccgaaaccgaagcgccagaagaagccatttccgaccttgcatggaaaaaacatcagatgccagcatggcatttaattaccgccgatggtcagggtattactctggtgaatattggcgtgggaccgagtaatgctaaaaccatctgcgatcatctggcagtgctacgcccggatgtctggttgatgattggtcactgtggcggattacgtgaaagtcaggccattggcgattatgtacttgcacacgcttatttacgcgatgaccacgttcttgatgcggttctgccgcccgatattcctattccgagcattgctgaagtgcaacgtgcgctttatgacgccaccaagctggtgagcggcaggcccggtgaggaagtcaaacagcggctacgtactggtactgtggtaaccacagatgacaggaactgggaattacgttacagtgcttctgcacttcgttttaacttaagccgggccgtagcaattgatatggaaagtgcaaccattgccgcgcaaggatatcgtttccgcgtgccatacgggacactactgtgtgttagtgataaaccgttgcatggcgagattaaacttcccggccaggctaaccgtttttatgaaggcgctatttccgaacatctgcaaattggcattcgggcgatcgatttgctgcgcgcagaaggcgaccgactgcatagccgtaaattacgaacctttaatgagccgccgttccgataataagttctgaaccttcttatcagaaatagatgtgaaggagtaagtaagacacctggcaaatagcctgcaataatcgtgggctgtttgcttccttgggcggatacgagttttattatcgtcttaatgatttccacatattaaaagcaagtatgctttcaaaacacaattataaaaaatcccgccaacaatataagtttttataaaattaaatataagattatggctttagaatatttttatttctaatagacgagatttttcctgttatgatataatatgctgaattaacacatgttaacgatttaccagtaatgtaaataaattttcgaggagatcattccagtgggacgtaaatgggccaatattgttgctaaaaaaacggctaaagacggtgcaacgtctaaaatttatgcaaaattcggtgtagaaatctatgctgctgctaaacaaggtgaacccgatccagaattaaacacatctttaaaattcgttattgaacgtgcaaagcaggcacaagttccaaagcacgttattgataaagcaattgataaagccaaaggcggcggagatgaaacgttcgtgcagggacgttatgaaggctttggtcctaatggcagtatgattatcgccgagacattgactagtaatgttaaccgtacgattgctaacgttcgcacaattttcaataaaaaaggcggcaatatcggagcggcaggttctgtcagctatatgtttgacaatacgggtgtgattgtatttaaagggacagaccctgaccatatttttgaaattttacttgaagctgaagttgatgttcgtgatgtgactgaagaagaaggtaacattgttatttatactgaacctactgaccttcataaaggaatcgcggctctaaaagcagctggaatcactgagttcagtacaacagaattagaaatgattgctcaatctgaagttgagctttccccagaagatttagaaatctttgaagggcttgttgatgcccttgaagatgacgacgatgtacaaaaagtttatcataacgtcgcaaatctctaattatcttttaaagaaatctgtctttacggcagatttctttaatctcatataattcttataaaaaatataatattcaactcgtcatattgattatacccccccgttcccagagaaataatatttattaaaattccagttcttctttttctgattacagaaggcaaagtggcaattacgcatagtttcccgataaagacgcgatagcgacatcccgcataaggcatttttctctttatctttgtacggtacttcatggaacagagtttttgaccttgcgaatcgtgatgtctgttggggagggacaatttgctcactgaagcgtgagactcgattaagcgcacgaaacacagaaatcaaaaaacccggtcacttttttacaaggtaaccgggtaaaaataatttttattttttaactgttttgagactcatagagatgtctcaaaactaaaatttggctcctctgactggactcgaaccagtgacatacggattaacagtccgccgttctaccgactgaactacagaggaatcgtgagaacgaggcgaatattagcgatgcccacccacaatgtcaaagcctgttttttaaatttgaaatcgtttgctgaaataatctgcattttgtcgtttattcgctcacaactggctttttttcacacttttgcggctcgggtcgagggtatttccatagccaacgtccagtaaccattcgccagtaaaacagcacggcccgcacagcccagtcggcaaacattcccatccagacaccaaccacaccccagccaagcatgattcccagcacataaccgactacaacccgacaaccccacatgctcaacatgctaacccacatggcgtaacgggcatcacgagcacctttaaatccagcgggtagcacccaactggcggaccaaataggcataaataaagcatttagccaaatcagaatcacaacgacatgtttaacctgtggatcctgggtgtaaaagcttgccataaccccggcaaagggagccgttagccaggcgatggccgttaatccaagagtggaaagccagaacacatgccgcaactgaatctctgcttgcgctatctgccctacccccaaccttcggcctgtaatgatcgtagaagcagagccgagcgcacttccgggtaagttgataagagccgcaatactaaacgcgataaaatttccggcaataacactggtccccatcccggcaacgaacatttgggttaataaccgaccactggtaaataacacactttcgacactcgcgggaataccaatccccatgacttcccagataatgctaaaattcagcggtttaaaatagctctttaagctaatccttagcgcaggattaaaaccaatcgccagcacccacaaaattgcaactgcgccaatataacgagaaatggttaaacccagccctgccccgacaaatcccagtcccggccaggagaaaaggccgtaaatcaatatgccgctaataataatattaagaatattcaggctaccgttaatcaatagcggtattttcgtattccctgcaccacgaagtgccccgctaccaataagagtgatggcagctgctggataactgagtaccgtcagctccagataagtcaacgccagtgctttaacttctgtcgtggcatcacccgcgacgaaatcaataatttgttcgccaaaatgatgaataagcgttgccaacagtacggcaaacaacgtcatgatcaccaaactctgccgcgtcgccaccctcgctcgtcgtcgatcccgcttaccgagactaaatgccacaacgacagtagtaccaagatcgatagcagcaaaaaaagccataatgaccatattgaagctgtccgccaatcccacgccggccatcgcatcttttcccagccagctgaccagaaaagtgctcagaacccccatcaacaggacacaggcattctccatgaagataggaacagcaagcggggttatctcgcgccagaacaacactttgtagctcttgcgtttagcgtgccagcgagtgccgtgaacaacctggcgtaaagcagaggagatattcaaagcgctccttaattgcagaaagtgaaaccacatttcaaataaactgggagaatcagcaaagctgcaaagattttcgccaacaaattgtctgcaaatgcaacaaactgtacttagaaacggcaaacagttggggaatttaaaaatcgggttactcaaaagatttttcgccgttaagatgtgcctcaacaacgattcctctgtagttcagtcggtagaacggcggactgttaatccgtatgtcactggttcgagtccagtcagaggagccaaattcctgaaaagcccgcttttatagcgggatttttgttatatctgataatcaatttcctcttcactgctttccatcacctgccgcttgatatcctcaacactcagtcctgcattacaaagttccagaaagcgccagacatagttacgctgaagttgtcctcgcttcagtcccaaccagacagtattagcatcaaaaagatgccgcgtatccaggcggattaaattctcttcctcttgttcgccactggattgctcggcaactaatccgatcccaagcccaagagcaacataggttttaatgacatcagaatcctgcgcacttaatacaatatctgccagcaaacctttgcgggcaaatgcgtcatcaatacgactgcgccccgtaatcccctgtcggtaagtgattaacggccacttcgctatactttccagcgtcaatggactaatttgcgtcaagggatgatcgtgtggaacaagcaaactatggtgccaacgaaaccacgggaaggcgacgagctgcgggtcattactcaaacgctcgctggcgataccaatatcagcttcgccattttgcaacaatgtcgcaatttcctgtggcgtcccctggattagctcgagccgaacctccgggaaaagttcgcgaaaagctttaatgacctctggcaagctataacgtgcctgagtatgcgtcgttgcaatagtgagaacgccagacgtatcgttggtaaacaggtctgcaagccgacgaacattactggcttcattcagaatacgttctgcaatgaccagtaatgctttgcccggttcagtcatgcccagcagtcgcttacctcgtcgaacaaatatttcgatgccaagttcatcctccagttcccgaatatgacggctgacgccactctgactggtaaaaagcatattcgcaacctctgtcaggttgtaatcctgacgtgcagcctcgcggattatctttagttgttggaaattcacggtaaactccgggcagttcagatttcccgttattgttaaagtctaatgcccggcataacaaataataaaaacccgcatcttattccatcccgatataacacttagctcaccaattgccactgccttttttccatcactggagaactaatcacactcattaacaactctttcactgcctgtgcctgtgggcttaagttcgctctggcgggtaaatttaaactcaaagagagactcatggaaggagtggtaatgcgactcatccacccatttactgcgccacataagctacgcgcggcgctttcgggtaatactgcaacgcccatgccgctggcaatcgctgcggtaagcgtggcaatagactcaatttcaccaataacttttgccgtgagtcgccgtagggaaaaagcctcatcaacacgaagtctaatagcactgtaatcactggggagaaagaggttcatttgcgcaatagcattcacatcaacgctttgccccgggcaatcttgagttcctaccagaaaaagatcttctttcagcaaagcctgactggatacaccagccacaggggaatgctcataaatcaccgccatatcgagttggtgatttatcaatttttcgttaagcactgcaccactattttcatgaagatagataacgatctccggaaattcagcgcgaaccgcctgtaataagggcatggtgatggaactcgcagcggttcctggtgcaaagccaatgctgacttgcccgcttaatgcctgaccaacgttatgcaccgccagttgggcctgttcacactgacgtaaaatggcccgcgcatgggtatagagaatttttccggcgtctgttggtgtaacgccccgctttgtacggatcaaaagttgttgatttaactcaccttccagtgtggcaacctgctggctgagcgctggttgtgcgatatgcaatacttcagcagcctgggtcaggctaccaatatctacaatttttacgaagtatttcaggcgtctgaagttcatgttgcctccggtttttaagaatcggcccaagtgccgccattacttacaaccagattgcaagatgcttgccagttttattttggtgttgatgtacaagctaaccaactgtcaaataagagattatgatagattcgtcatttgctcctttaatcagctgtcgcgttcccctgccctataaaaggagggtatgcaccacgatggttcattacccaataagattgaaagctcaccactttgttgaaattgacagcaaacaaacaaaaaaatgcatttcaccctttgacatcaccatgcactgccattaatatgcgccccgttcacacgattcctctgtagttcagtcggtagaacggcggactgttaatccgtatgtcactggttcgagtccagtcagaggagccaaattcaaaaaagcctgctttctagcaggctttttgctttctaattaccaacgctcttaaaacatctgtctactaccagaactaatttgcacaggcattccgcttcgacgttgcaacgcagcatttgcgcgatttacatcaacttcttgcccgttgataaacgcccgcaaagatggggttaccggcaatggcacttttcggtcagactcatattctgcacgattgcggctcaatggctcatgaacttccagccagttgctgccatctggttcagtggtgtattttactggctggtcgataatttgcacacgcgtcccaacaggaacattatcaaacagatatttgatatcgtcattgcgcagacgaatacagccctgacttacccggagcccaataccaaaattggcattggtaccatggatggcatacaacctgccaatataaatcgcgtacagccccatgggattatcggggcccgcaggaacaaatgcgggcaaactctcccctcgtttcgcatattcgcgccgagtgttcggcgttggcgtccaggttggagcttcttgtttacgttcaacggtagtcacccagttacgcggggtttctcgcccagcctggccgataccaataggaaagacttccacagtattactgtctggtgggtagtaataaagacgcatctcagcgacgttaacaacaatccctttacgaacagtgtcgggcaaaatcagttgctgcggaatggtgagttggctgccagacttcggcaaaaaaacatcagcgcccgggttcgcttccagcatgttacttaacccttgcccgtattgtgcggcaaaagtctccagcggctgggtattgtgatcaggaacagttacagtaaagctctgccccactaaacggctaccctctggaggtaatggataagttaccgccaggctagtatggctggcaaaaagcagagcaaaactgcaaagaatatttacacgacgcatcatgtccctttcctatgtcgcgaaagctatccgttaagtatagcttttatcagacttttcgtttttaactgttcaaatcagaagtcgtattccccggtagaacaatattactggcagcaagttcgcccatgttgttgtatatcgcacaggcagcttcgatgatgggcatcgccagagctgcgccactcccctcacctaaacgcatctccatattgagataaggctccagccccaaatggctgagcgctatacgcgcgcctttttctgcgctcaggtgagaaggaatgagatacggtttgatcgcaggagacatctggcaggctgcgagcgcagcagcataagaaagaaatccatccagcaacacgggtaaaccgcaggaagcagcacctaacatcactccagctattccgaccaaatcaaatccacccacttttgccaggacatcaacaccatcctgaggatttggttgattcaacgtaatcgcccgacgcacaacatcaattttattagccagtttatctgtcggcaggtttgcgccaatcccaaccacttcttcaggatcccggccagtgattgtgctgactattgctgctgccggtgtcgtgtttgccatccccagttcacctacaccaaacagcgtgacaccgttttttgccagctcctgcgtataacatatgacgtccaaaagcaacttttcagcctgacggcgactcattgccggagcactagcaatattgccgctacctcgtgcgacacgcatgttgataagcccggggataggctcagcagtatcaataccaacatcaattacgtggacgttagcgcccgcttgttctgccagcacacacacgccggttgttccacgggtcatattttcagcctgtatggctgtcacttcttttggagaaatagcgaccccttcctcccagacgccgtgatcggcacacataaccagtaccgcttttttgcccacatgcggtatgccattcaaccccggcattcctgccagttgtatggcaagcacctccagctttcccaggctaccaacaggtttgagtaacccgtcaatatgccgttgtgcacggctcatagcggtagaatcgatggctgggatcgtattcagtaaatcggcaagtatttgcatctcacgtctctttatagcagtgccagcaggaagaccagttcaccaagctctatggctgctcccagcgtatcgcccgtttgcccgcccagcgtacgtttgagaagctgaccgaggatgaaaatcgccaccatcgtcaccaccatagcagccacaccatgcatacccggcaataatacggcagcaaaaatagcggctaagccgagtgtgacgcaggtttgtcgcccatcaattttgccaatgaacacattgccaagcccttcttcccgcgcataacgatgacgatacatcaataatgcggcagtcccgcggctgaccgcacatgctgccgccaggcttgcaaggatgctttcgccacgcagagccaactcgcttaacaccagaatctttgccagtaccacaaaaatcaatgccagaccgccgtgggtgcctaaacggctatcacgcatgatttccaacatgcgatcgcggctacgtgcagaaaatacgccatcacaggtatcagcgaggccgtccagatggaatcccccggtcatcagcaccagcacaagtacgctaaacagtgccgccagtggtgcgccacaccatgcctgcagcaccatgaagaccagcccgctaatcgcgccaagcaataatccaatcaaaggaaaagtaataataccgcgagaataatgctcgaaatccagtccctgggaccagcgacgcggtacaggcagacgcgtaataaaactgagcatcgcccaaaataatttactcatttgatttttactccaataccgctaaccaccagccatacttcatttgccgcagcggccaactgctgatttacccgcccggcaatatcacgaaaatgtcgtgccagacgactctccggcacaatccccattcccacttcgttagtcactaatacaacctttgcggggcaacgttggcaggcagcaatcaagctctgaatctcagcattaatcgcctgttccatcgcctgataatcccattcatcagggtctttatcgccgccataatcaaacaacagattagtcaccattgtggtaacgcattcaagcaacacaacctcattcgggttaatgtctgcatgaattaattcatcaagatgttgccagcgctccactgtgcgccagtgctccgggcggccttgccgatgatgttctatccgtgcagccatctcatcatcaaggatttggctggtagcgatatacagaacctgactagagtccccaataagcgcctctgcgtggcgactcttcccgctccgtgcgccccccgtcaccaaaatcatcataccgactcctgattcaaatgtatgatggtattcattgaacagaacaatggatcccccaccgttgctgaccgcaaaacatttacgcgattaatactgcgcgtaatataattaaaaatccagcattctcaatccattacgaaataagatggcattacggaatagccagactttctcgtgttaacgtccgacaaaatgcgtcattgacagcggtttctgtggattgacacatttcattcagataatgaattaatgctactgccggaacaaccagcaaacgggcattgtgttctgaaatccaggctattgattcaacgtcagcgacagatctgcgctgtaaaagaacttgtaaaacaacgtaatagaattatccggaatggtggcgactatgcactagggaaggtgcgaataagtggggaaattcttctcggctgactcagtcatttcatttcttcatgtttgagccgattttttctcccgtaaatgccttgaatcagcctatttagaccgtttcttcgccatttaaggcgttatccccagtttgcagaaactccgtaatgagattaaaagcgctcataactcatctgtcggccagaaggcgcgcctctgaattatccgacggacaaaccgggaacagtgtaatttcccggcaggagcgaaaaaattgaaaggcgcatcttactcttttcgctttcaaaaaaaagagtggtcatcgcgttaacacaccgccctgagatgaattagtgatgttttggctgcaccgcaacatacatttcgatatcccagtacccatcttccgcgccattgttcaaataaacctcgaagcagggctttggtaacatttcataagcactgtcctgcaagagactattaaagaactgataccagggtttagcaaaatcatcaccgactacacgagctaccgccaccgcatactgaccacctgtaatttctgtcagaatgacgccctcactgttttcgggaagcgtaaagtaacccggcaccgtcacgacggtgtcgcagcgtaatttttcggcgggtgtttcatctggattgtcgtaatagacagcaacccactccttcggcacaatatttttgctatctacccacatcatcaactgctcaaagcctttctttaccgtctgttcccacgggccaacgagatggaaacctgcaacggtacgtttctcttcctgcttaatctcgtagttcatgacgcctccattgatactgtttttatatacagtatagttgcaaaattaaaaccacaaggaatgagtgttgattatgcgagcagactcgcactcctgccagtctgctgcaaaagaaaggtcaggccttatggtggaaataatcactcaggcgagaaaacatgctgccttccccgacagattccagggtaaccagcggccagtgcgccacctgtttatcacggtcgtaaagttcaatttcccctacccgctgatgggcgctaattggcgcggtgagttctttaccatcaagggtatatttggctttgatatgtggaatttcggctttcggtagcaccatccagaactcttgttccgttcccaggtcgatattttctttatcgccataccagatgcgttccgttccgacctttttcccacggtgcaaaatttgcaccgtagtaaagttttgttgcccccaacgcagtaattttcttgcctcttcctcacgaccttttgcactgtcagcccccattaccactgcaatgagacgacgctgcccatctacagcgctagcaatgagattaaacccggcaccagaagtatgacccgttttcaggccgtcaacattcatggttttatcccacaacaacccgttacggttttgctgggtgataccgttccaggtgagacttttctcactgtacatatgataaaactcgggctcgccgtggatgatagcacgagaaagcacagctaaatcataagcgctgctatgctggccaggtgcatccagaccatgcactgtttcaaaatgcgtatccttgagatgcagcttctcggcatagttgttcatcatttcaacaaactgccgttgcccaccggcaatatagtcagccagagcaacacaagcgtcatttccggaatccacaattaaaccacggcttaaatcacgtacgcttacgcgatcgccctctttcaaaaacatcagactagaaccgacaaacaccggattatctttcgcccacgcatcgcgccccacggtgacaatatcgtctggcgtaatgcgatgactatcgatagcgcgatccacgacataacccgtcatcagctttgtcaggctggcgggattgcgctgttgatgctcattacccgcggtgaggatctgaccggtggtgtaatccatcaatacccaggacccggcatgaatctctggaggctgaggactaaaaggaatgttttccgccgcaaaaccagagcttaagttaaaaacgaacaaagaagcagcaataataagacggcgtttcaacagcaaaccctcaggagtttcaaatagctgttctttttacggaaatacttatgaactggctggaataaagtgcaagaaaatgtgactaccctctcatttttatctgacatgatctgttgccactcgctgccaaattgtggcgctaaagctgattagcacggtgatatttgatactctggcagacagcagaaataacggatttaacctaatgatgaatgacggtaagcaacaatctacctttttgtttcacgattacgaaacctttggcacgcaccccgcgttagatcgccctgcacagttcgcagccattcgcaccgatagcgaattcaatgtcatcggcgaacccgaagtcttttactgcaagcccgctgatgactatttaccccagccaggagccgtattaattaccggtattaccccgcaggaagcacgggcgaaaggagaaaacgaagccgcgtttgccgcccgtattcacagcctttttaccgtaccgaagacctgtattctgggctacaacaatgtgcgtttcgacgacgaagtcacacgcaacattttttatcgtaatttctacgatccttacgcctggagctggcagcatgataacagccgctgggatttactggatgttatgcgtgcctgttatgccctgcgcccggaaggaataaactggcctgaaaatgatgacggtctaccgagctttcgccttgagcatttaaccaaagcgaatggtattgaacatagcaacgcccacgatgcgatggctgatgtgtacgccactattgcgatggcaaagctggtaaaaacgcgtcagccacgcctgtttgattatctctttacccatcgtaataaacacaaactgatggcgttgattgatgttccgcagatgaaacccctggtgcacgtttccggaatgtttggagcatggcgcggcaataccagctgggtggcaccgctggcgtggcatcctgaaaatcgcaatgccgtaattatggtggatttggcaggagacattagcccattactggaactggatagcgacacattgcgcgagcgtttatataccgcaaaaaccgatcttggcgataacgccgccgttccggttaagctggtgcatatcaataaatgtccggtgctggcccaggcgaatacgctacgcccggaagatgccgaccgactgggaattaatcgtcagcattgcctcgataacctgaaaattctgcgtgaaaatccgcaagtgcgcgaaaaagtggtggcgatattcgcggaagccgaaccgtttacgcctagtgataacgtggatgcacagctttataacggctttttcagtgacgcagatcgtgcagcaatgaaaattgtgctggaaaccgagccgcgtaatttaccggcactggatatcacttttgttgataaacggattgaaaagctgttgttcaattatcgggcacgcaacttcccggggacgctggattatgccgagcagcaacgctggctggagcaccgtcgccaggtcttcacgccagagtttttgcagggttatgctgatgaattgcagatgctggtacaacaatatgccgatgacaaagagaaagtggcgctgttaaaagcactttggcagtacgcggaagagattgtctaatttgaagcctccgccgctggtacggcggaggacaatgttgagtcaggctttttgaacggtgatgctccacgctgcatcgccaatctgctgataatcggtgatggcatgtccttcttctgccgcccactgtgggattgcttcagttgcctgggtgcaatcaaactcaatcactaactcatcgccgctgaccatttctgccagagctgcttttgcttctatgagtggaaacggacagacctgcgtcaccacatccagctttttaatcaccatctttacaccttacttaatttgccgcagcagttgccagtcgcgccttacgctgcggtcgaacatacacaagccaggacgcagtccagactccgagaatcataaatacaaggccaatccagccctgccaggtcatcattgcagtcataaccagtccattaccgatagagcaaccacctgcaatactggcaccgaagcccatcagtacaccacctaacccgctacgtaatgttgtttgtgcatcagctgcgcgaacgcggaactcacggctcgctttggctgcaataaaactccccacgaagatccctaacaccaggaaaacgccccagttaatgtatttcatgtcacccgcgaccagaaattgcagaatattggccgttggggaagtgattcctaacccaaacatgcgtccggttgcttcactcaggggccaggctaaaagcgcaatcaaaccgatgagtacagctgtgacaaagggatgccagcgtttttcaaacagaatatgagcgatcccggttcggcgcggcggtaaggtcgcgactttgagttttggcttcttcaactctttcatcaccacccagagcgttatcaccagcaaaacggcaaccaacggccacacagacaaattaaaagtctcagcaatagagttatgttcagtactgtagtgctgcaaggtttgatttaaaccactggcatgtggagaacgcatcaccgcactcatcaccatataagtgaaaagcgcgatccaactgccgatcaatccctcacccgcgcgataccaggtcccggtggcacatccacccgccagaacaattcccagcccgaagatatacccacctataacagtaccaagccacgggaacgccccggcttcgtaagtcagtaggcccgcctgaattaacgcaaaaacccccacgctttgtacgctaattgcaatcagcaaggcgtaaaacatgcgattatttttcacgatatacatatcgcgaaaaccacctgtcaggcaaaaacgcccacgctgcatgacaaatcccagcagagcaccacaaattagcccgcttaatatcatactaaacataaattaattaaccagatgaatgttaatgaggaaattattcatgactggtggaatgcagaccaataaccaaattctctaaattagaacaaatggttattaatgaggagttcgatacaaaagaataaaaaaaccggagccaaatgttcattcgactccggtttattattagaaaagatgattatgctacgtcttcgtactgcggaaccggattacggaagctcttggtgacgcaagccaggtaaatcagaccgatagcagcccagatcagacccagaaccatactgctttcttccaggttaacccacagcgcaccaacggtcagcgcaccacacatcggcaggaacagatactggaagtgatctttcagcgtcttgttacgcttctcacggatccagaactggctgatgacgctcaggttaacgaaagtgaacgccaccagcgcaccaaagttaatcagcgccgttgccattaccaggtcgaagttgattgccagcagggcaatcgcgccaaccaggatgatgttcatcgccggagtacgccatttcgggtgtacataaccgaagaagcttttcgggaatacgccgtcacgacccattacgtacatcagacgcgctacgcctgcatgcgccgccataccggacgccagtacggtaatggtggagaagatcagcgcgccaacctggaacgctttacccgcaacgtacagcatgatttcaggctgactcgcatccggatctttaaagcgagagatatccgggaagtacagctgcaggaagtaagttgcaaagatgaagatcatgccgccgatcagcgcggtcaggaaaatcgcacgcgggatcacgcgctctgcatctttggtttcttcgctcaggttgctgatgccgtcaaagccggtaaaggagaagcacaggattgtcgccccggtaatcatcgggataacatgcgcatcgccagaccagaatggacgagtgctcgccagcgtaccagcgccttcaccttcaaatacgccataaacaaccatgcccagaatcaccgcgatcagcactacctgcaacacgacgattacagtgttgaagttcgctacggatttcagactacgcaggttaaaggcggtcataaaggccaccagcgccaccacaaacatccagcttgggatggaaggcaccagagcttcaaaatagattttcgccagtagaatgttgatcatcggcgcgaacagatagtcgagcagagaagaccaacccaccataaagccgacagtcgggctaatggatttctgggcgtaagtgtatgcagagccagcagaaggatagcggcgaaccagcttcccgtagctcagagccgtaaacaggatcgcaatcaatgcgaacgcataggctgtcggcacatgaccatccgtgaggccactaacgataccaaaagtatcaaacagcgtcatcggctgcatataggcaagacccatcattacaaccggaactaacgtaagcgttttacgcaattccacgcgagaggtgtttggagtaacgttatggctcatggtcattctcctttacggtgataaccgtcgcgtaagcaaaaaattgccccatttttttggattcctcagcgacaacaactgtcgatttttagtaaatatctatccggtacgaagcccggcctcttggtatgaatgattggtttgaagcaaaaaataaccgacgctgatgaaacgtcggtttttagtcattttttgacagcggcgcattgtgcctaaatgggggggaaatgacaagagaatgagaggcttgtcagaataatttttctttaaatggcactttttccgtcatcagattttgcataaacaccggcgatcgcactatttgctaaaatttcatcccgccaccagccactggcaagtcctgcggtctgttcgttccagccaatccagacgggttcaaagagagtttgggcgaccactttcttctcgattaacgcgccactatcgagaaaacgttgcgccagataacggggtaaatagccgcagccgaggccgctaatttgcagctccagtttggttttaaaatcgaaaacggtaatggcttcttgttcgtcgagaagttgacttgccgtagaagcgcctgcctgcgcagtatcccccaccacaatcgcccgatatcgcttaataatacgacgatttaacggctcttcttccagggctaacggatgatgaggcgcgaccgcaaagacttgttccagatcgcccaaccgactaaaaccaaactcactggaagatggtggctcatgcatcgcgccaacaataatatccgctcgcccctgagtcagggcatcccaactaccaccgagtacgccattgataaacttcaggcgcgtcacgctatgatgttgataaaaagcttcaatgagtggcgcaagcagagaaaaaggaaacgtgtcgtccacgccaatcaccagctcgttttcccagccttcatgcagtttgatcgcctgcttttccagttcccgcacggtatgcagaacttcccgccctttctctaataacatttttccggtgcgggtgaatttagcgcggtgtccgctacgatcaagcaattgaatattaaggtcgctttccagcttgtgaacggtgtaactcagagcggacggcgtcttgtagagtttggcgctcgccgccgcaaaactgccttctttttctaaggcatcgaggatcatcaacacatccagcagtggtttcatacacgcccccttgcagtgcatgcggcgtcctgctggcgtgatcgtttactccagcggcattaccagcggatcgggatactggtattcaaatcccagttcattacaaatccgactgccatcaataatcttacctttgccgctgtccagactatttctgaactgcggaggttccagccccagtaaacgggccatctgcggatagaaaacattacgcgcagggtgagctggcgcacatatattatagatgtgtccgcctttaggtgcctgtaacaacagagtgatagcgccaataacatcttctaaatggactaaattaacaccatgttcaccatcaggcgcggtttttccggcaaagaagcgtccgggatgacgtcccggtccgaccaggcccgcaagacgcagaatatcgacgctagtaccgggtaaattgtgcagccagtcttcgagttcttctaatactcgtccactgttggttactggattacgcggggtggtttctttcaccgtgccttgcgcgtcgccatagacagatgtactgctggtaaaaataatgcggggaatacgatgggccagcgcgctatccactaactcttgtaccgcttgtaaatagaactcatcgccggggccgctacgacgtgccggaagcgtaatgaccagcgcatcggcatccatcagggcatccagatcgtcagaatcgcaaactagctcaggctccatgcgaagcagatagctatcaatgccactcattcgggccgcttcgacaccatcttgtgtggttttactcccggtgacttgccagcctcgcgcactaagactcatcgccagcggcatgcctaaccaccctaacccgacaattgcgacctttttcatccgttatctcctgatacaccttagatctataaggctacgctagcgtatcaaaactgacaattcattctatgaatgaatctgttcaataatgataacgacatgctgcaatgagcagactatcgtcggtaaccgcgtataccagacggtgctcctctgtaatgcgtcgggaccagaaaccactcaaattatgtttcaggggttctggcttccccttaccttcaaatggcgttctgcgggtatctttgataagttcattgatctttttaacaattcgcttatctgtttcctgccagtacagataatcgtcccaactttcctcagaccagattagtttcactcaatgatgtccttttccgttcctttgccacttttcaggctatcgatactgtccatcaatctccgggcgttagcgggggagcgcagtagataagccgtctcttccaggctgttgtattcttcgagactcatcagaacacaagcctctccattctgacgagtaataaggatcggggcatgatcttcaacggctttcatcattgttgcgctcaaattctgacgcgcttcgctgtagctaattgtacgcatgtcaatctcctcttttgtacagttcattgtacaatgatgagcgttaattaactatttattaattagtttgtagatcaaggtattgtcagtgagacgaaaatccaggcttcgctatttttggtgccatcagctaagaggacagtcctcttagccccctcctttccccgctcattcattaaacaaatccattgccataaaatatataaaaaagcccttgctttctaacgtgaaagtggtttaggttaaaagacatcagttgaataaacattcacagagacttttatgacacgcgttcaatttaaacaccaccatcatcaccatcatcctgactaatctttcaggcgatgtgtgctggaagacattcagatcttccagtggtgcatgaacgcatgagaaagcccccggaagatcaccttccgggggcttttttattgcgcggttgataacggttcagacaggtttaaagaggaataacaaaatgacagacaacactcgtttacgcatagctatgcagaaatccggccgtttaagtgatgacagtcgcgaattgctggcgcgctgtggcattaaaattaatcttcacacccagcgcctgatcgcgatggcagaaaacatgccgattgatattctgcgcgtgcgtgacgacgacattcccggtctggtaatggatggcgtggtagaccttgggattatcggcgaaaacgtgctggaagaagagctgcttaaccgccgcgcccagggtgaagatccacgctactttaccctgcgtcgtctggatttcggcggctgtcgtcttagcctggcaacgccggttgatgaagcctgggacggtccgctctccttaaacggtaaacgtatcgccacctcttatcctcacctgctcaagcgttatctcgaccagaaaggcatctcttttaaatcctgcttactgaacggttctgttgaagtcgccccgcgtgccggactggcggatgcgatttgcgatctggtttccaccggtgccacgctggaagctaacggcctgcgcgaagtcgaagttatctatcgcagcaaagcctgcctgattcaacgcgatggcgaaatggaagaatccaaacagcaactgatcgacaaactgctgacccgtattcagggtgtgatccaggcgcgcgaaagtaaatacatcatgatgcacgcaccgaccgaacgtctggatgaagtcatcgccctgctgccaggtgccgaacgcccaactattctgccgctggcgggtgaccaacagcgcgtagcgatgcacatggtcagcagcgaaaccctgttctgggaaaccatggaaaaactgaaagcgctgggtgccagtagtattctggtcctgccgattgagaagatgatggagtgatcgccatgagctttaacacaatcattgactggaatagctgtactgcggagcaacaacgccagctgttaatgcgcccggcgatttccgcctctgaaagcattacccgcactgttaacgatattctcgataacgtgaaagcacgcggcgatgaggccctgcgggaatacagcgcgaagtttgataaaaccacggttaccgcgctgaaggtgtctgcagaggagatcgccgccgccagcgaacgcctgagcgacgagctaaaacaggcgatggcggtggcagtaaagaatattgaaaccttccacactgcgcaaaaactgccgccggtagatgtagaaacgcagccaggcgtgcgttgccagcaggtcacgcgtccggtagctagtgttgggttgtatattcctggcggctccgccccgctcttcagtacggtattaatgctggcgactccggcgagtattgcgggctgtaaaaaagtggtgctgtgcagtccgccgccgattgccgatgagatcctttatgcggcgcagctgtgcggtgtgcaggacgtgtttaacgtcggcggcgcacaggccattgccgcactggcgtttggtacggaatctgtgccaaaagtggacaaaatcttcgggccgggtaacgcctttgtcaccgaagcgaaacgtcaggtgagccagcgtctggacggtgcggcgatcgatatgcccgcaggcccgagcgaagtgctggtgattgctgacagcggcgctacgccggatttcgtggcttctgatttgctctctcaggctgaacacggcccggacagtcaggtgattttactgacgcccgctgctgatatggcgcgtcgcgttgccgaggccgtcgaacgccaactggcagaactgccgcgtgccgaaaccgcccgccaggcactgaacgccagccgcctgatcgtgactaaagatttagcgcagtgcgtggagatctccaaccagtacggcccggagcacctgatcattcagacccgcaacgcccgtgaactggtcgatagcatcaccagcgccggtagcgtatttcttggtgactggagtccggaaagcgcaggtgattacgcctccggcaccaaccacgttctaccgacttacggttacaccgccacctgttccagcctcgggctggcagatttccagaagcgcatgaccgtacaggaactgagcaaagaggggttctccgcgctggctagtaccatagaaacactggccgccgccgagcgcctgaccgcccacaaaaatgccgttactttgcgtgttaacgcccttaaggagcaagcatgagcaccgtgactattaccgatttagcgcgtgaaaacgtccgcaacctgacgccgtatcagagcgcgcgtcgtctgggcggtaacggcgatgtctggctgaacgccaacgaataccccactgccgtggagtttcagcttactcagcaaacgctcaaccgctacccggaatgccagccgaaagcggtgattgaaaattacgcgcaatatgcaggcgtaaaaccggagcaggtgctggtcagccgtggcgcggacgaaggtattgaactgctgattcgcgctttttgcgaaccgggtaaagacgccatcctctactgcccgccaacgtacggcatgtacagcgtcagcgccgaaacgattggcgtcgagtgccgcacagtgccgacgctggacaactggcaactggacttacagggcatttccgacaagctggacggcgtaaaagtggtttatgtttgcagccccaataacccgaccgggcaactgatcaatccgcaggattttcgcaccctgctggagttaacccgcggtaaggcgattgtggttgccgatgaagcctatatcgagttttgcccgcaggcaagcctggctggctggctggcggaatatccgcacctggctattttacgcacactgagcaaagcttttgctctggcggggcttcgttgcggatttacgctggcaaacgaagaagtcatcaacctgctgatgaaagtgatcgccccctacccgctcagcacgccggttgccgacattgcggcccaggcgttaagcccatagggaatcgtcgccatgcgcgaacgggtagcgtaaattattgcagaacgcgaatacctgattgccgcactgaaagagatcccctgcgtagagcaggttttcgactctgaaaccaactacattctggcgcgctttaaagcctccagtgcggtgtttaaatctttgtgggatcagggcattatcttacgtgatcagaataaacaaccctctttaagcggctgcctgcgaattaccgtcggaacccgtgaagaaagccagcgcgtcattgacgccttacgtgcggagcaagtttgatgagtcagaagtatctttttatcgatcgcgatggaaccctgattagcgaaccgccgagtgattttcaggtggaccgttttgataaactcgcctttgaaccgggcgtgatcccggaactgctgaagctgcaaaaagcgggctacaagctggtgatgatcactaatcaggatggtcttggaacacaaagtttcccacaggcggatttcgatggcccgcacaacctgatgatgcagatcttcaccagccaaggcgtacagtttgatgaagtgctgatttgtccgcacctgcccgccgatgagtgcgactgccgtaagccgaaagtaaaactggtggaacgttatctggctgagcaagcgatggatcgcgctaacagttatgtgattggcgatcgcgcgaccgacattcaactggcggaaaacatgggcattactggtttacgctacgaccgcgaaaccctgaactggccaatgattggcgagcaactcaccagacgtgaccgttacgctcacgtagtgcgtaataccaaagagacgcagattgacgttcaggtgtggctggatcgtgaaggtggcagcaagattaacaccggcgttggcttctttgatcatatgctggatcagatcgctacccacggcggtttccgcatggaaatcaacgtcaaaggcgacctctatatcgacgatcaccacaccgtcgaagataccggcctggcgctgggcgaagcgctaaaaatcgccctcggagacaaacgcggtatttgccgctttggttttgtgctaccgatggacgaatgccttgcccgctgcgcgctggatatctctggtcgcccgcacctggaatataaagccgagtttacctaccagcgcgtgggcgatctcagcaccgaaatgatcgagcacttcttccgtagcctcagttacaccatgggcgtgacgctacacctgaaaaccaaaggtaaaaacgatcatcaccgtgtagagagtctgttcaaagcctttggtcgcaccctgcgccaggccatccgcgtggaaggcgataccctgcccagcagcaaaggagtgctgtaatgaacgtggtgatccttgataccggctgcgccaacctgaacagcgtgaagtctgccattgcgcgtcacggttatgaacccaaagtcagccgtgacccggacgtcgtgttgctggccgataaactgtttttacccggcgttggcactgcgcaagcggcgatggatcaggtacgtgagcgcgagctgtttgatctcatcaaagcctgtacccaaccggtgctgggcatctgcttagggatgcaactgctggggcggcgcagcgaagagagcaacggcgtcgacttgctgggcatcatcgacgaagacgtgccgaaaatgaccgactttggtctgccactgccacatatgggctggaaccgcgtttacccgcaggcaggcaaccgcctgtttcaggggattgaagacggcgcgtacttttactttgttcacagctacgcaatgccggtcaatccgtggaccatcgcccagtgtaattacggcgaaccgttcaccgcggcggtacaaaaagataacttctacggcgtgcagttccacccggagcgttctggtgccgctggtgctaagttgctgaaaaacttcctggagatgtgatgattattccggcattagatttaatcgacggcactgtggtgcgtctccatcagggcgattacggcaaacagcgcgattacggtaacgacccgctgccgcgattgcaggattacgccgcgcagggtgccgaagtgctgcacctggtggatctgaccggggcaaaagatccggctaaacgtcaaatcccgctgattaaaaccctggtcgcgggcgttaacgttccggtgcaggttggcggcggcgtgcgtagcgaagaagatgtggcggcgttactggaagcgggcgttgcgcgcgtagtggtcggctccaccgcggtgaaaagtcaagatatggtgaaaggctggtttgaacgcttcggtgccgatgccttagtgctggcgctggatgtccgtattgacgagcaaggcaacaagcaggtggcagtcagcggctggcaagagaacagcggcgttagtctggaacaactggtggaaacctatctgcccgtcggcctgaaacatgtgctgtgtaccgatatcagccgcgacggcacgctggcaggctctaacgtctctttatatgaagaagtgtgcgccagatatccgcaggtggcatttcagtcctccggcggtattggcgacattgatgatgtggcggccctgcgtggcactggtgtgcgcggcgtaatagttggtcgggcattactggaaggtaaattcaccgtgaaggaggccatcgcatgctggcaaaacgcataatcccatgtctcgacgttcgtgatggtcaggtggtgaaaggcgtacagtttcgcaaccatgaaatcattggcgatatcgtgccgctggcaaaacgctacgctgaagaaggcgctgacgaactggtgttctacgacatcaccgcttccagcgatggccgtgtggtagataaaagctgggtatctcgcgtggcggaagtgatcgacattccgttttgtgtggcgggtgggattaagtctctggaagatgccgcgaaaattctttcctttggcgcggataaaatttccatcaactctcctgcgctggcagacccaacattaattactcgcctggccgatcgctttggcgtgcagtgtattgtggtcggtattgatacctggtacgacgccgaaaccggtaaatatcatgtgaatcaatataccggcgatgaaagccgcacccgcgtcactcaatgggaaacgctcgactgggtacaggaagtgcaaaaacgcggtgccggagaaatcgtcctcaatatgatgaatcaggacggcgtgcgtaacggttacgacctcgaacaactgaaaaaagtgcgtgaagtttgccacgtcccgctgattgcctccggtggcgcgggcaccatggaacacttcctcgaagccttccgcgatgccgacgttgacggcgcgctggcagcttccgtattccacaaacaaataatcaatattggtgaattaaaagcgtacctggcaacacagggcgtggagatcaggatatgttaacagaacaacaacgtcgcgaactggactgggaaaaaaccgacggacttatgccggtgattgtgcaacacgcggtatccggcgaagtgctaatgctgggctatatgaacccggaagccttagacaaaaccctcgaaagcggcaaagtcaccttcttcagccgcactaaacagcgactgtggaccaaaggcgaaacgagcggcaatttcctcaacgtagtgagtattgccccggactgcgacaacgacacgttactggtgctggcgaatcccatcggcccgacctgccacaaaggcaccagcagttgcttcggcgacaccgctcaccagtggctgttcctgtatcaactggaacaactgctcgccgagcgcaaatctgccgatccggaaacctcctacaccgccaaactgtatgccagcggcaccaaacgcattgcgcagaaagtgggtgaagaaggcgtggaaaccgcgctggcagcaacggtacatgaccgctttgagctgaccaacgaggcgtctgatttgatgtatcacctgctggtgttgttgcaggatcaggggctggatttaacgacggtaattgagaacctgcgtaaacggcatcagtgagttgcggggtaagcggatgcgatattgttgccgcatccggcaaaaaaacgggcaaggtgtcaccaccctgccctttttctttaaaaccgaaaagattacttcgcgttgtaattgcgtagagcattacgccccagcacaatccccgcgccaaccatgccacccagcagcaccgccagaatcaaggtaattgcctttttcgggctatcacgacgaataggtaacatcggtttcatcacataacggtaagcatgaatatcaagatcatcaacttttaagctttcgatatccagcaggttttgacgagtctgatagtagtttgggctgaacaccaacggacgggtcgcctcatgcttaatcatgctctccagcgcttcgctccccaaaaggaacaacgtatcttgtgtgatatcttcgccagtctgttgaatctgcggttttgtcacctgcgcctgattcgcatactgcaacgcttcctgaatctgacggatacgcagatctttctgctcctgcgcgactacttcctgcgttcttaaagagtcctgcaagtttttccgtcccagagcaatgttgtctttgagatccttttctagctcttgattcactttatcgtcaacttgctgaatgtattgggccaacttcatttgtgcgccctctgcagtttgcccaacataagaaacagtcaatggtaattgctggttcttaacagaaggttcgatggtaagtttttctcgttcttcctgattatccagcgtttctgctaatgcagagaaggcagaactgaagcgaccaattaacgtctcctgcaaatcgcttactttcggtgcagcctgaccatagataacattcatggcattgttatagccagcaatttgccccacgtcgggctgagtgataattgctgtactcgtccatttctccttcgctactgccaaatatccaatagccagggcaatagccacaatgacggaaatgatgattgtcatcttgccacgccacaactgcactagtaaatcaatcaaatcaatctgttccgggtcatggttttgcccagaaacattattattttctactctcatcattaccctaactgacggaaatttccaagtccgcatagtttagcgataatcctcgtgaatgctataggataagtgataaaaataatgaattgttgtgtaagtaacaaaagacaatcagggcgtaaatagccctgataacaagatgttagtcgctgccaaagagatcgcgggtgtataccttatctgccacatccttaagctcttctgccattcggttagagataatgacgtcggcttgttgtttgaaggtggcgagatcacgttccaggcgagagttgaagaaactgtcttctttcatcactggctcgtagatgatcacttcaacacctttcgccttgatacgtttcataatcccctgaatagaagacgcacggaagttatcactaccgctcttcataatcagacgataaatacccaccacttgcggcttgcgactcaaaatggcatcggcaataaaatctttacgcgtgcggttagcatcgacaattgcgctgatcaggttattcggcacagactggtagttcgccagtaactgcttggtatctttcggcagacaataaccaccataaccaaagctcggattgttgtaatggttgccaatacgtgggtcgagacaaacgccttcgattatttgacgggaattcagacctaaactttctgcatagctatccagttcgttaaagtacgccacgcgcatcgccaggtaggtgtttgcaaaaagtttaatcgcttctgcttcagtggagtcggtaaacagcatcgggatattttgcttaatcgcgccttcctgtaacagagcagcgaaacgttctgcgcgttcactacgctcaccgatgacaatacgactaggatggagattatcgtaaagggctttaccctcacggagaaattccggggagaatataatattttcagtgcgatatttcttatgcatcgctgcggtaaaaccaacgggaaccgtacttttgatgaccataaccgcataaggatttatctcaactacgtctttaattacactttctacactggatgtattgaaataattagttttaggatcatagtcggttggagtggcgatgatgacataatcagcatcccggtaggcttcatttttatctaatgtggcattaaagtgtattttatcactttgcaaaaactgctgaatttccttatcaacaataggagatatccgatcattcagcatagcaacgcgactcggtaaaatatctaatgccacaacctcatgattttgtgcgattagaagcccgttactcaagcctacatagccagtaccggaaatggtgattttcatttcatgctctcagaattaacttaactgtgaatcatgatgtttttagcatcctgataagagctaaaagttttaacgctacgttgttcgatggtcaacgcaacgaaaaacaattcagattttctttataagaatagctgatatttattaagttaatattaagcagtgaaatttagtctataagatatttggcaaaaaaaagcccggtgcaatatacgccgggcctcaattttattgttggttaaatcagattaatccagccattcggtatggaacacaccttctttatcaatacgcttataagtatgcgcaccaaaatagtcacgctgtgcctggatcaggttcgcaggcagaacagcagcacggtagctgtcgtaataggcaaccgctgcggagaaggtcggaaccggaataccgttctgtactgcataagcaacgacatcacgcagcgcctgctggtagtcatcggcaatttgcttgaagtacggagccagcaacaggttagcgatctgtggattttcggcataagcatcggtgattttctgcaggaactgcgcacggatgatgcagccagcacggaaaatcttcgcgatttcgccgtagttcagatcccagttgtactcttcagacgcagcacgcagctgagagaagccctgggcgtaagaaacgattttgcccagatacagcgcacgacgaactttttcgatgaactcagccttgtcgcctgctggctgtgcttgcggaccagagagaactttagatgcggcaacacgctgatctttcagagaagagatataacgtgcaaacacagactcggtaatcaggctcagcggttcgccgagatccagcgcgctctggctggtccatttaccggtacctttgttagccgcttcatccaggatcacatcaaccaggtagttaccgtcttcatcttttttggtgaagatatctttggtgatgtcgatcaggtaactgctcagttcaccgttattccactcggtaaaggtctgcgccagttcttcgttggtgaggttcaggccacctttaagcagagaataggcttcagcaatcagctgcatatcgccgtattcaataccgttgtgaaccatcttcacatagtgacctgcgccatcggcaccaatataggtaacgcatggttcaccgtcttcagctacggcggcgattttggtcaggatcggtgctaccaattcataggcttctttctggccaccaggcataatagaaggacctttcagcgccccctcttcaccgccagaaacaccggtaccgatgaagttaaagccctctgcactaagctcacgattacgacgaatagtgtcctggaagaaggtgttaccaccatcaatgatgatgtctcctttatcgagatatggtttgagggaatcaatagcagcatccgtgcctgcacctgctttcaccattaacaggatgcgacgaggcgtttccagagattcgacaaactctttcaccgtatagtaaggaaccagtttcttgcctggattttcggcaatcacttcttccgtcttctcacgggaacggttgaaaatagagacggtataaccacggctttcgatgttgagcgcaaggttgcgtcccatcactgccataccgactacgccgatctgttgcttggacattacatactcctgtcaggtgtgatcaccgcgctgaatgctcgcggcctggaatgttcgcaaataagtatacaaagtacttattaaagtataaatagcttatccatgcttatatgcttacggctttatatgtctccacatgcgatatttcttaaataatgttttattattaccacttttaattcagggataatgtgaggttattaccctcaaataatatgagataaatagtgctgcaacattgcatttttgccccgatttatccatgatcgaattgtgacatttgtcatacaacgaataggttttgtacttactatggaatggattgccgatccgtctatctgggccgggttaatcacgctgattgtgatcgaactggtcctcggcattgataacctggtctttattgccatcctcgccgaaaaactaccgccgaagcagcgtgaccgcgcacgggttaccgggctgctgctggcaatgttaatgcgcctgttactgctggcgagtatctcctggctggtcaccctgactcaaccgctgttcagcttccgcagctttacctttagcgcccgcgacttaatcatgctgtttggtggtttcttcctgttgttcaaagccacgatggagctgaacgaacggctggaagggaaagacagcaataatcccacacaacgcaaaggtgcgaagttctggggcgtggtgacgcaaattgtggtactggacgccattttcagtctcgacagtgtgattaccgccgtcgggatggtcgaccatttactggtcatgatggccgccgtggttatcgctatcagcctgatgttgatggccagcaagccgttaacgcaatttgttaacagtcacccgacgatcgttattctctgcttaagcttcctgttgatgattggctttagcctggtggcagaaggtttcggcttcgtcattccgaaaggctacctgtacgctgccattggtttcagcgtgatgatcgaggcgctcaatcagttggctatctttaaccggcgacgttttctttccgctaaccagacgctgcgccagcggactaccgaagcggtaatgcgcctgcttagcgggcaaaaagaagatgcggaactggacgccgaaaccgcgtccatgctggtggatcatggtaaccagcagatctttaatccgcaggaacggcggatgattgagcgggtacttaatcttaaccagcgtaccgtcagcagcattatgacgagccgccacgatattgagcatatcgatctcaacgcgccggaagaagaaatccgccagttgctggagcgaaatcagcatacgcggctggtggttaccgacggtgatgacgcagaagatttgctcggtgttgttcacgttatcgacctgctacaacagtctctgcgcggcgaaccgctcaacctgcgggtgttgattcgccagccgctggtgttcccggaaaccttgccgttgttacctgccctggagcagttccgtaatgcccgcacgcactttgcttttgtggtggatgagtttggcagcgtggaagggattgtgacattaagtgacgtcactgaaaccattgccggtaacttaccgaacgaagtggaagagatcgacgcccgccatgatattcagaagaatgcggacggttcctggacggcgaatggtcatatgccgctggaggatctggtgcaatatgtgccgctgccgctggatgaaaaacgtgaatatcacaccattgccgggctgttgatggagtatttgcagcgtattccaaaacctggcgaagaagttcaggtgggggattatttgcttaaaacgttgcaggtagaaagccatcgcgtgcagaaggtgcagattataccgctgcgtaaggatggcgagatggagtacgaggtgtgatggtatcggtcattttacccaatagccgaaaggaataagatgagggaaccgcgccatcggcgatttaccgccgggagcccgggttgccagggtggtggagattgagccaccctggcacgttcaccggcttgagcgttccatagtagcgaggaacatcaagtgaacggaacagccttcgatcttacatattcagaatataatgatgccgccacgaacgcctgatgcgacgctttacgcgtcttatcaggcctacaggactggtcacctggtaacttacatcttctccagcaacttcttcacatctttgccattacgggaatctttattccgctcggcccagtcattcaggcgacgtttcgcttcgtcctgtagatgtttgcgcagtaactgatccacttgcaggctgtaattgagttgctgccagttgccataaacccgcagcggtactggcgtttctttcaggaaatcaatcagtttgctttccccgttccagccacccacgacccgaatatcaaactgggtgtcgcaggtttgatctgccagattcaacatgccttcccctgtcagcgccagcacagggctttgaccttgcatgtcgtttaacgtcacgacgccatccttcaacgtcaaatcggtggtaaagcggtcaagccgcgtcacgttatcaaagttttcagcggccttcacatcaccgccattacgctctaccgcttgctgaatcatctgctggaagttcatcccttccatgcgcgtgtcggtcatttcgacatgtgcctgtccttgccagttgtggcggaatgcgtcggcatctatgtcagcaccggagaaatcaccagccagactcatttttccggtcaagctaatcggatagttaaacgccttcagaatggtaccaatctcaacgttttccagccgtggctggaagtttatccgcggatttatacttgtcgcgtccagcgtgcccggcagactaacctgtccaccgttaagtttgccctgcagttgagtaatttccagcaaaccgctcttgttggtcatttgcgtggcaacatctgtaaaattcattccgcgccagcgcacgttactggcctgcaacaaaatatcagccgtaaagccttgcagtccctgataggccggttcatcaatacggctagaaatgaccgggcgcggcaacgtactttggctctgcccctgctgcgcggcaccgttttcaccattcgcggtttcattaagcgggatgaggttgtcaagattcagttgcgggaattgcagcctcagctgccattccggtttctctgtcagcgtaacctgtgcttgcccgcttagcgtactatcattggcggtcaaactaatttggttaaaactaaggcgtttatgactctcctgccactgggcctggaaactcccctgcccctgaataccttgttttggtaaatcggcaccctgcaactgccagttaatttgttcaatagccgccgttaaatcatgcggataatcagaagcatctaccgtaccgttaagggatatcgtgagatcgcgctgatcgcgattaacccgcccggagaactcaaaactaccacgatgttggggatcttgttccatttgcaggcgaatattgcggattgtcacctgctcgtcatcttcatgctggaacaccagcacgctgtccgccaccttaagactggatatatcaaagctccatccgcgatcgtcactcagatccggcaaggtattgtcgcgcggtgcaaccggagcgtcttcactgcgcaccgcttccgtctgcggcgtcagttggatcactgccccttttagcatcacctgcttaacgctcagttgatgactcagtagtggtaaaagcgccacgtccagacgcatgttgtcggcgcgaaccagtggctggcttgcgccctgggcggtgagagacattcgcccggagaggatactaagctgcggccagacgtgccaacgcagtggcccgtcgagctgcaattgataaccgctacgtgcagcaacttgcttgaccatatagtcgcggaaatcattcggattcaccagcaacactaacgcagataacccggccaccagcacgaccaggagtatcatcagcgtcgtcagaaatcgtctcatggtatcctcaatgggcctgaattagtctttatcgattcggctggctaccgcgccctgctggttgcgatatttcgcatcttcacggcggttgtaaggtcgcaccgccgggccggaaagcggctcaaagctcagcgcaccaattaacatgcccggacgcagcgccagcggcagcttaccggagttgtagaactccagcacaatgcaaccagaccagcccggatcgatgcggtgcgcggtgacgtgcaccatcagccccagacgcgccagactggaacgcccgtccagccagcccaccagatcggctggcagcgtcacgctctccagcgtcaccgccagcgccagctctcctgggtgaagatagaacgcctcgccctcgtcgagaacgatctcatcgctcatcacgcggtcaagcgcggcgctcacttcatctttgggaccgctcagatcgataaacgctgccgtgtgaccacggaaggtacgaaatttattgcccaggcgtacatccaccgtcgcgccgttaatacgctccactggcggacgtgggttgatgctcaaacggccttcatcaagccaggcttcaatatctcggtcacacagacgcatggcattttctcctttcgcgcatcactcccttaacgccaattacgtcaagggcatactaggttatcactgaacggtacacaatttatcaagcttattcaaagaactgacttattttcgctttcaatatatcgatcgcgatgcggtttttcccgccgcgcggcacgataatgtccgcatattgtttagaaggctcaatgaattgcaggaacatcgggcgcacggttttttgatattgcgccatcacactatccatactacgcccacgctcgttaacgtcacgcttgatgcggcgcatcaggcagatatccagcggggtatcaacgaaaatggagaagttaagttcgtcacgcaaacgcgcatccgtcagcaacaaaatgccttcgagaatgatgaccttcttcggctcaaccgtcaccgtttctttcatacgcgtatgttcaacatagctgtaaaccggcaggtcaattgcgctgccgcgtttcaacgcttgtaaatgctcaagcagcagactgtgatccatcgcgctgggatggtcgtagttggtcttaacgcgttcttccatgctcagatggctttgatctttgtaatagcagtcttcgggaattacgccgatgtgttcatcaccgacttgctcacgcaattcacgataaagggtactggcaataagactcttgccggaagcgcttgcgccagcgataccgataatgacgcactgatgagactgatcagtcatatatttagcgacctgattaacctggatgttaggaagggggcgacgaagcgccaaacgcggcaattatagggatttcatccgtctgataccagtcgaatagcgttgccgcgcgctcagagttaattgttgacaaagaattcccgggggcaaattacgttgatcagttttatgtaaggtaaaaaatgttaaacgcagttgcgcaaattatccgcctttacgtcactttatgagcaattcgcatataaaatgtaaaacttttgtactagcataaacacagaaacgaatactggcgaccaggtcttgcggataaagcggtaatgagcaaacaaagtcagcatgtattaattgccctgccccacccgctgcttcacctggtcagtttaggtttagtcagctttatctttacccttttcagccttgagcttagccagtttggcacccaactcgccccactgtggttcccgacgtccatcatgatggtggcgttttatcgccatgccgggcgcatgtggccgggaattgcgctgagctgtagcctgggaaatatcgccgcatccatcctgcttttttccaccagcagcctgaacatgacctggacgaccatcaatattgttgaagccgtggtcggggcagtgctgctacgtaaattgctgccgtggtataaccccttgcaaaatctggctgactggctgcgtctggcactcggcagcgccattgttccgcctctgttggggggtgttctggttgtcctgctgacgcccggagacgatcctctcagggcatttttgatatgggtactgagtgaatccatcggcgctctggcactggtgccgctgggattgttatttaaaccacactatctgctgcgccatcgcaacccacggttgctttttgagagcctgctcacgttagccatcacactgacgttaagctggcttagcatgctgtatctgccgtggccttttactttcattattgtgctgttgatgtggagcgccgtgcgtctgccacgaatggaagcctttttgatcttccttaccacggtgatgatggtgagcctgatgatggccgcggatccccccctgcttgctacgccgcgtacgtacctgatgagccatatgccgtggctaccgtttttgctgatcctgctgcccgccaacatcatgaccatggtgatgtatgcctttcgtgcggaacgcaaacacatttccgaaagcgaaacccactttcggaacgcgatggaatattccgctatcggtatggcgttagtgggcaccgagggacaatggctgcaaaccaacaaagcgctctgccagtttctcgggtacagtcaggaagagctgcgcggactcacctttcagcaactgacctggccggaggatctcaataaagatctccaacaggttgaaaagctgataagcggtgaaataaacacctatagtatggaaaaacgctactacaaccgcaatggcgatgttgtctgggcgttgcttgccgtcagtctggtgcgccacacggatggcacgccgctctattttatcgctcagattgaagacattaacgagctaaaacgcaccgaacaggtcaatcagcaactgatggagcgcatcactctggctaacgaagcgggcgggattggcatctgggagtgggagttgaagccgaatatttttagctgggataagcggatgttcgagctgtatgaaattcctccacatatcaaaccgaactggcaggtgtggtacgagtgcgtgctgccggaagatcgccagcatgccgaaaaagtgattcgtgatagcttgcaaagtcgcagcccctttaaactggaatttcgcattaccgtaaaagacggtattcgccatatccgcgccctcgccaaccgggtactgaataaagaaggcgaagtcgaacgtctcctcggcatcaatatggatatgaccgaagtgaaacagcttaacgaggcattgtttcaggaaaaagagcgcctgcacattacgcttgattccatcggtgaagccgtggtctgtattgatatggcgatgaaaattacctttatgaatccagtggcggagaagatgagcggctggacgcaggaagaagcgttaggtgttccgctcctgacggtgttgcatattacttttggcgacaacggaccattaatggagaacatttacagtgccgacaccagtcgttccgcgatcgagcaagatgtggtgttgcactgtcggagcggcggcagttacgacgtgcattacagtattacgccgttaagtactctggacggcagcaatattggtagcgttctggtgattcaggacgttaccgaaagtcgcaaaatgctgcgccagctgagctacagcgcctcccatgatgcactgacgcatctcgccaaccgcgccagttttgagaaacaactgcgtatcctgctgcaaacggtaaacagtacacatcagcgacatgccctggtgtttatcgatcttgatcgctttaaagcggtgaatgacagcgccgggcatgcggcgggtgacgctttgctgcgcgaactggcgagcttaatgctgagtatgctgcgttccagcgacgtgctggcgcgactcggtggggatgaatttggtctgctgctaccagactgtaatgttgaaagcgcgcgttttatcgctacacgcattatcagtgccgtgaatgactatcactttatatgggaaggccgtgtgcatcgggtaggtgccagtgccgggattaccttgattgatgacaacaatcatcaggcggcagaagtgatgagccaggctgatatcgcctgttatgcctccaaaaatggtggccggggccgggtgacggtttacgaaccgcagcaagctgccgcacatagcgaacgggcggcgatgagccttgatgaacagtggcggatgattaaagagaatcagttgatgatgctcgcccacggtgtcgctagcccacggatcccggaagcgcgtaatttgtggctgattagtcttaagctctggagttgcgaaggcgagattattgatgaacaaacatttcgtcgtagcttcagcgatccggcgcttagccatgctcttgaccgccgggtattccacgaatttttccagcaggccgcaaaagcggttgccagtaaaggcataagcatctccctccccctttccgttgccggtttgagtagcgccacgctggtgaatgatctgcttgagcagctggaaaatagccctctaccaccacggttattacatctgattattccggctgaagcgattttagatcacgcagaaagcgtgcaaaaactgcggctggcgggatgtcggatagtgctcagccaggtgggccgcgatctgcaaatcttcaacagcctgaaagcgaatatggcagattacctgctacttgatggtgagttatgcgccaacgtgcagggtaatttgatggatgagatgctgattacgattattcaggggcacgctcagcgactcgggatgaaaaccatcgccgggccagtcgttttacccttagtgatggatacgctttctggcatcggcgtcgatctgatttatggtgaggtgattgccgatgcccaaccgctggatttgctggtgaatagtagttatttcgcgattaactgaggcgtgcttccccatcgcctgatgcgacgctaacgcgtcttatcatgcctacaaatcgctcattccccaggccggataaggcgctcgcaccgcatccggcgaccaacgtcatgcttcgtctggttgccagccttccgtataccagatatgcaacagcgcataagaacgccagggcttccagcgctcggcataacggcggatttgcgccggtgtcattcccggaaatcgctgtttaatcagataatcatccggcaggaaaacatctttcgcctgccagccacgcaaagcaaaataattcgccgtccagcgcccgatacccggaaaagtttgcagcgttttcatcgcctgctccacatcgcccggtattgtcattggtaaggtgccctccagcgccgcatttgccagatgaatcagcgcctctgcccgtttcaacggcatacctaacgcttttaatgcctgcgggtctgctgctgccagccgctgaggcgtcgggaagcagatatactccggaaaatcatccagccgttcgccataaagctgtgccactctggcggtcaattttgccgccatcgccacgctcaccagttggcctaaaatcgcccgcacgccctgctcaaaagcatcaacacagccgggtaaacgcaatccgggccgcgccgcgcctaacctgcccaacgcaccgttaacaatttgtgggttacattgcagatcaaacaggcggctcattttcgccagacactctgcggcaacaggttctaaacctgcacttaaatttatgtgcagagtatggcgggctatatccggaatagcagtcaccacgccgcgatattcgcccaccgccagactacgggcataataactgtccgcgaccgtttccacactgctcaccgcacgggcggcgagaaatcccaacatccagctccagtcatacggcggctgccagttcagggtatacatcgcatctccttattcatccgctttcagcataaacgttattcagacgctgcgctttgctttcatattccggttgtcgcgacggcaacatttcgctaaagtcacgccccttcttcaccggcatggggattatttcgtgtttattggttttgattacggtacagcaaactgtagtgtggcggtcatgcgtgacggtaaaccgcatttgctaaaaatggaaaacgacagcacgctgctgcctagtatgctttgcgcgccaacgcgtgaagcggtaagcgaatggctgtaccgccatcatgatgttccggcagacgacgatgaaacgcaggcgctgttacgtcgggcgattcgttataaccgcgaagaagatatcgatgttacggcgaaaagcgtgcagttcggtctttccagtctggcacagtacattgatgatccagaagaagtgtggtttgtgaaaagtccaaaaagcttcctcggtgccagcggcttaaaaccgcagcaggtagcgctgtttgaggatctggtctgcgcaatgatgttgcacattcgccagcaggcgcaggcacagctgccagaagcgattactcaggcggtgattggtcgtccgatcaacttccaggggctgggcggtgatgaagcaaacacccaggcgcaagggattctggaacgcgcggcgaagcgtgccggattcagggacgtggtattccagtacgagccggtcgcggctgggctggattacgaagccaccttgcaggaagaaaaacgggtgctggtggtggatatcggcggtggtacgactgactgtagtttgctgctgatggggccgcagtggcgtagccgtctcgatcgtgaagccagcctgctgggtcacagtggttgccgtattggcggtaacgatctggatatcgcgctggcgtttaaaaacctgatgccactgctgggtatgggtggcgaaaccgaaaaaggcatcgccctgccgatcctgccgtggtggaatgcggttgccatcaacgacgtacctgcgcagagtgatttctacagtagtgccaacggtcgtctgcttaacgatctggtacgcgatgcccgcgaaccggaaaaagtggccctgttacagaaagtctggcgtcagcgtttaagctatcgcctggtgcgtagcgcagaagagtgcaaaattgctcttagtagcgtagcggaaacccgcgccagtctgccgtttatcagcaatgaactggctacgctgattagccagcgagggctggaaagcgccctcagccagccactgacgcggattctggaacaggtgcaactggccctggataacgcccaggaaaaaccggacgttatctacctgaccggcggtagcgcccgttctccgctgattaaaaaagcgctggcagaacagttgccgggcattccgattgcaggcggcgatgactttggctccgtcaccgccgggctggcacgctgggcggaagtggtgtttcgttaattgaaaaatggctcagcagcggcttaaatctgcctgcgcctgagccagtttttctgctgcctgacgtaacggttccatcaacggcatggtccgtgctggagcatgaaggcggaatcgctgcaactctgtcgcgccgactgtcaacgcgctttccagccgatgtcgtttggcggtcattttcgccattaccgcttgtctgtctgctggcgttatcgcttcattcggcctgaacacaaaacggcgttcacagctcgctttccagtcgataaccgcctgggtcagatggtcgccaaaccctttcacttgcttaacgccacgacgggtaacatctgcggctgtttcaataccaaaagaccgtaacgccgctttacgcgcagggccaacgccgggaatagaggcaacatcaataaaaaatccctccagaaacttctgcttctgccgttcccttgcagtgtcatgaagtgctgccagagcgcgtttctcttcttccggtaacccgagaatttcgtccttcattttttcgagcatcgtccgtttggcgataaaaccttccaggccgcctacctgctggatctggcggactaaatggtcatagtccattttcgcacgattaaatgcctcacggcgttgctgaacttctgctttgtacgctttgcttgtcagactgccaataatccagatagccgccagcacaggaaccaaaataatataacgcggttctgcctgaaggccgcaaagcagcaggcttaatgcactcagtgcgatctcaagcagaatgatgtattcgcgccgtaacaggcctaaaggaagcggcctgccagtcggttggaaatgatcgggtaatggcagttgcaatgctggcggtgctacactcgccatcaccatcgcccagactttcgccagcacaaaattcccgccggtggtaatgacctcttcgccgagatcaataaaatagataacaccttgattatccagcgcacaccacgggcagtcagtcaaatgagcggggtaaacatgcattgcactaacgatacatttctttaactgttggcgtagagagtccagtgccgctacccacgctttagccgtcggacgcccggttgccacgccactttccgtgaatgcctgctgaaacatggcttcaacatcactcggtaacatgcttagcggaatagatcgtggcggcggttttaaaccacgtcgctgattatcactcgcgtaggcataacggaaatgggtaatatccgtctccagcgcattacccgcatcagagataagcggcacaccagaataaggatgccgcccaccaaacaagacgtgaaaaattagcaacgcaaggccaaaattatcgtgattttctgtgcgttcaaaaccgacaaaacttggcaaggtttgtagctctggcggcgtaaaatggctcacgccgacttcgcataaatgcagtgtgccattggcgttaatttgaaaggagtcgctatcaatcagtaccactttgctgtcgcgacctaccataaaactgttctggtttacgtcacccacgacgtgcccgtgctcgtgaaccgtagcaaaagaactagcaatattgcgcgcaacatagagtagaaaatcccacgcacaatgagggtaactctggcgacgatgtgccgggctatagatcatatgaatcggttctttaccagaaacttttggcatcataaaaccgataacttttccgcctcgtccaccgtgaagcgttgcctgcggccaggcgacataattcaacaactgcgcgtcagctgtcgcagccataaaggcaagtttgtcctgttttaaggcgggtggcggcgtgtgataaatcttggcgacgctatcgacaaactcctcgatatcataaaccgcgccttcaccacctttgcccagttcacggccaagagtggtcaattcacctgtgcttgtaaatacttttatatttgttttcataatatttcgcgggtagttatattatatttcaatgaataataacaactaaccattaaaattatttctatatggggaaaacccactcaagaataaaaatgataatgcaattttatcaggatacaattcaatttcggcctgataatgattaacttccacaggtttttgctaactttgactacaaagggattctggagaaaaaatgaaaaagatattacttatgttgagtctgctattttttactaccgcgggctttagtgaagttagcgatacgttagtgacgggaggttatgataaacaagcgatgtctgacgcgattaaacatgcgcggaaagaaaccgataaattcatcgaggttatgaataaaaaagatgccgatactttcgcagtcaaagccccgataaccgatcacggaagaaccgagcatttctggcttacggatgtcacttattctaacggcatgtttattggcgtaatcagcaatgaccctggtattgttacaaacgtagaatatggccaggagtggaaaatcaagaaagaagatattagtgactggatgtatacgcgcggggataaaatttacggcggttataccattgatcctttattggtcacctatccaaaagaagaagccgacgagctaagagcaaaattagttcgctaatcagccgttatatttattgtttaaactggcggttgaattgttgtcttcaaccgccatgagaaactcactctgcccacagcgccagtgccaacgttttatcatcatccgtacgctcgtttaccgccgggctggacaaaaactgctttaacaattcaggtaataaatcgagttgttcctgcgttgctgccgccagtccattgaaaaacggggtaaagaaaggcacatgaggagaattatccagcatatttaacgccagtcgctggataccatccgtaaatgctgcaactttgtgcgcacgcccagtgctggtgagagtttccagtctggaaacggcatcttcgtcggtaatgaagtgcgtcatgttggcatattcacccgccatcggcgtgagaggcaattgcagaccgtgacccaaatctaccaccacgccgccatcgccaatctgcataatcaaggtgccgtcagggctactaatcagtcccagaaatgtgcaggcaaaatcgcgaaccgctaattctttggcttccgcctcggcaaaaagtcgttgacgaatggtcagtaccatatttgtggcgaggacatcattaagccccaattccccgccctgcactttttggctcatataagccatcgcttcattgacggcgagcatcgcgccttcgccaccctggctgacactgcctgcgccatcagcgacaaatacgctcaataatggctgctggtcatttaaccaggcaatctgcatctggcaggcatcctgacaaggcaagtccgcgctgatgtggctcgttccaacggtacttgcatagaccagacgccagctcacacactcgtccagccttttggcgcttccagcacaacttccgttcccggcgtggagcgggaaacgctacgcaggctactggataaccagctaaacagttcacggaattgtaatccttgcagaggcaaaggctgacgaacgctaatttgtgccagcgtcttcatatccgccccctgaacaccgatggaaaagaaagcaaaccttttatcttcttccccccgaaacactttgttggctgcagcctgccactcatcggttggtgcaccatcggtaatcaggaaaatccacgggcgataatagctaataccatttgcacgatactcacgtttccgctcctctaccatatccagggctttggtaatggccgcacccattggtgtatcgccctgggcaaacaggatgggcggaaaaaaattagcggcgctggtaaagggttgttccacatgcaccgggccgaacgtcacaatgccgagttccactctttttaaagccagcggatcagcaagcagttcatcacgaaaggtaaccaatccggcgttaagttcattaataggtctaccgttcatagaaccagaaacatccagcagcaaaatgcaggggcaacgtggttccgggttactggcaaaatcgctggtggcaaacgtgatttgttcgctcataagaaatcctttcttagagaattatcgaggtccggtatcataccgactgcaataatgaaataagagcaaacgaagaaactttcagaattaggcccggcggcgcagaaaattttgctattcgcctcgcaagaacggagagccgtcgattgacactaagggcggagtgacataatttcaggagtgagggttagggagaggtttccccctccccctggtgttcttagtaagcctggaagctaatcactaagagtatcaccagtatgatgacgtgcttcatcataaccctttccttattaaaagccctcttctccgggagaggctttcccgtttcagcgtcccgctgaaatcatcggcttacctcctttcgccctgaatgcagtctatcgctaacgcgtgaataaaatagtttcctctgtgattattgcgtaacgactcgcaaagaatatttgctggcaggatcgcagactacaaagcctgcggattgacaatcttatcgtgaagacatactttcaggagtgagggtagagcggggtttcccccgccctggtagtcttagtaagcggggaagcttatgactaagagcaccacgatgatgagtagcttcatcatgaccctttccttatttatggccccttcctcgggaggggctttcccgtttcagcgtcccgctgaaatcgtcggcttacctcctttcgccatgcaagcagtctatcgctaacgcgtagataaaatagtttcctgtgttattactggatgcgtgctcgcaaatgtgcccgtcattcagacgattccagacagtgtttcataattcctccatttttctcccttattggctggctacactagtatcattccgcgaaacgtttcaggaagagaaactcttaacgatgaaaggtagttataaatcccgttgggtaatcgtaatcgtggtggttatcgccgccatcgccgcattctggttctggcaaggccgcaatgactcccggagtgcagccccaggggcgacgaaacaagcgcagcaaagcccagcgggtggtcgacgtggtatgcgttccggcccattagccccggttcaggcggcgaccgccgtagaacaggcagttccgcgttacctcaccgggcttggcaccattaccgccgctaataccgttacggtgcgcagccgcgtggacggccaactgatagcgttacatttccaggaaggccagcaggtcaaagcaggcgatttactggcagaaattgaccccagccagttcaaagttgcattagcacaagcccagggccaactggcaaaagataaagccacgcttgccaacgcccgccgtgacctggcgcgttatcaacaactggcaaaaaccaatctcgtttcccgccaggagctggatgcccaacaggcgctggtcagtgaaaccgaaggcaccattaaggctgatgaagcaagcgttgccagcgcgcagctgcaactcgactggagccggattaccgcaccagtcgatggtcgcgttggtctcaagcaggttgatgttggtaaccaaatctccagtggtgataccaccgggatcgtggtgatcacccagacgcatcctatcgatttagtctttaccctgccggaaagcgatatcgctaccgtagtgcaggcgcagaaagccggaaaaccgctggtggtagaagcctgggatcgcaccaacagcaagaaattaagtgaaggcacgctgttaagtctagataaccaaatcgatgccactaccggtacgattaaagtgaaagcacgctttaataatcaggatgatgcgctgtttcccaatcagtttgttaacgcgcgcatgttagtcgacaccgaacaaaacgccgtagtgatcccaacagccgccctgcaaatgggcaatgaaggccattttgtctgggtgctgaatagcgaaaacaaggtcagcaaacatctggtgacgccgggcattcaggacagtcagaaagtggtgatccgtgcaggtatttctgcgggcgatcgcgtggtgacagacggcattgatcgcctgaccgaaggggcgaaagtggaagtggtggaagcccagagcgccactactccggaagagaaagccaccagccgcgaatacgcgaaaaaaggagcacgctcctgatgcaggtgttacccccgagcagcacaggcggcccgagccgcctgtttattatgcgtcctgtggccaccacgctgctgatggtggcgatcttactcgccgggattatcggttatcgcgccctgcccgttagcgcgctgccggaagtggactatccgaccattcaggtggtcacgctctacccaggtgccagcccggatgtcatgacctctgccgttaccgcgccgctagaacgccagttcgggcagatgtctggcctgaaacagatgagcagccaaagttccggcggtgcgagtgttatcactttgcagttccagctaacattaccgctcgatgtcgccgagcaggaagtgcaggccgcgattaacgctgcgaccaacttgttgccgagcgatctgcctaacccgccggtttacagcaaagtgaacccggcagatccgccgatcatgacgctcgccgtcaccagtaccgccatgccgatgacgcaagtggaagatatggtggaaacccgcgtcgcgcagaaaatcagccagatttccggcgtcggcctggtgacgctttccggcggtcagcgtccggctgttcgcgtcaaacttaacgctcaggcgattgccgccctcggcctgaccagcgaaaccgtgcgcaccgccattaccggcgctaacgttaacagcgcaaaaggtagcctcgacggcccttcccgtgcggtcacgctttccgcgaacgaccagatgcaatccgccgaagagtatcgccagctaatcatcgcctaccagaacggcgcgccaattcgtctgggcgatgtcgcaactgtagagcaaggtgcagaaaacagctggctcggcgcgtgggcgaacaaagaacaggccattgtgatgaatgttcagcgccagcccggtgctaacattatctccaccgccgacagcattcggcagatgctgccacagctcactgagagtctgccgaaaagcgtgaaggtgacagtgctttccgatcgcaccaccaatatccgcgcatccgtcgatgatactcagtttgaattgatgatggctatcgcgctggtagtcatgattatctacctgtttttgcgcaatattccggcgaccatcattcccggtgttgctgtaccgctgagcttaatcggcactttcgcggttatggtgtttctcgattttagtatcaataacctgacactgatggcgttaactatcgccaccggattcgtggtcgatgacgccatcgtggtgatcgaaaacatttcccgctatatcgaaaaaggcgaaaaaccgttggcggcggcgctcaagggcgcaggtgaaatcggctttaccattatcagcctgaccttcagtctgattgcggtgttgatcccactgctgtttatgggcgatatcgtcgggcgactgttccgcgaatttgctattaccctggcggtagcgattttgatcagtgcggtggtgagcctgaccctgacaccgatgatgtgcgcgcggatgctcagccaggagagcttgcgtaaacagaaccgcttctcccgtgccagcgaaaaaatgttcgacaggataatcgccgcctatggtcgtggactggcgaaagtgctgaatcatccgtggctgaccttaagcgtggcactcagcacgctgctgcttagcgtgctgctgtgggtgttcattccgaaaggtttcttcccggtacaggacaatggcattattcagggcactttgcaggcaccgcaatccagctcctttgccaatatggcccagcgacaacgccaggtcgcggacgtgattttgcaggatccggcagtgcaaagcctgaccagttttgttggcgttgatggcactaacccgagcctgaacagtgcacgtttacaaatcaacctcaaaccgttggatgaacgtgatgatcgggtgcaaaaagtcatcgcccgtctgcaaacggcggtagataaagtgccgggcgtcgatctcttcctgcaaccaacgcaggatctgactattgatactcaggtcagccgcacccagtaccagtttaccttgcaggccacgagtctggatgcgctcagtacctgggtgccacagttgatggaaaaactccagcaactgccacagctttctgatgtctccagcgactggcaggacaaagggctggtggcgtatgtcaatgttgatcgcgacagcgccagccgtctggggatcagcatggcggatgtcgataacgccctgtacaacgcgtttggtcagcggctgatttccactatttatactcaggccaaccagtatcgcgtggtgctggagcacaacaccgaaaataccccaggcctcgcggcgctggataccattcgcctgaccagcagcgacggcggcgtggtgccgctaagcagtattgccaaaattgagcagcgttttgcgccgctctccatcaaccatctggatcagttcccggtaacgaccatctcctttaacgtgccggataactatagcctgggcgatgcggtgcaggcgattatggacaccgaaaagacgctgaatctgccggtggatatcaccacgcagttccagggcagcaccctcgccttccagagcgcgctgggcagcactgtctggctgattgtcgcggcggtggtggcgatgtatatcgtgctcggcattctgtacgagagctttattcacccgatcaccattctcagcacgctacccaccgcaggggttggcgcactgctggcgttgctgattgctggtagcgaactggatgtgattgcgattatcggcattattttgctgatcggtatcgtgaagaagaacgccatcatgatgatcgacttcgcgctggctgctgagcgcgagcaaggcatgagcccgcgcgaggcaatctaccaggcttgtctgttgcgttttcgtccgatcctgatgaccactctggcggctctgcttggcgcgctgccgctgatgttgagtaccggggtcggcgcggaactgcgtcgtccgttaggtatcggcatggtcggcggtctgattgtcagccaggtgctgacgctgtttaccacgccggtgatttatttgctgttcgaccgcctggcattgtggaccaaaagccgctttgcccgtcatgaagaggaggcgtaagtgaagttttttgccctcttcatttaccgcccggtggcgacgattttactgagcgttgccattaccctgtgcggcatactgggcttccgtatgctgccggtcgccccgctgccgcaggtcgattttccggtgattatcgtcagcgccagcctgcccggtgcgagtccagaaacaatggcgtcttccgttgccacgccgctggagcgcagtcttgggcgcattgccggagtcagtgaaatgacctccagcagtagcctcggcagcacgcgtattattttgcagtttgattttgaccgggatatcaacggcgcagcgcgtgatgtgcaggcggcgatcaacgctgcacaaagtttgctgcccagtgggatgcccagccgcccgacctatcgcaaagcgaacccgagcgatgcgccaattatgatcctcacgctgacgtccgatacttatagccagggtgaactgtacgatttcgccagcacgcagctggctccgacgattagccaaatcgacggtgttggtgatgtcgatgtcggaggcagcagtctgcccgccgtacgcgtcgggctgaatccgcaggcgctgtttaatcagggcgtgagcctggacgacgtacgcaccgccgtcagcaatgccaacgtgcgtaaaccgcagggcgcgctggaagatggcactcaccgctggcagatccagaccaatgatgagctaaaaaccgccgctgaatatcagccgttgattattcactacaacaacggcggcgcggttcgtctgggcgatgtggcgacggtgaccgacagtgtgcaggatgtgcgcaacgccgggatgaccaacgccaaaccggctattttactgatgatccgcaaactgccggaagccaatattatccagacggttgacagcatccgggcaaaattaccggagttgcaggaaaccattccggcggcgattgatctgcaaattgcccaggatcgctcccccaccattcgcgccagcctggaagaagtcgagcaaacgctgattatcagcgtggcgctggtgattctggtggtgtttttattcctgcgcagcggtcgcgccactattattcccgccgttagcgtgccggttagcctgattggtacgtttgcggcgatgtacctgtgcggattcagtctcaataaccttagcttaatggcgctcaccatcgctactggtttcgtggtggatgacgccatcgtggtgctggaaaacattgcacgtcatctggaagcgggaatgaaaccgttgcaagccgcactgcaaggtactcgcgaagtcggttttacggtgctgagcatgagtctgagtctggtggcggtgttcctgccgctgctgttgatgggcggattgccgggccgactgttacgcgaatttgccgtgacgctttctgtcgccattggtataagcttgctggtttctctgacattaacgccaatgatgtgtggctggatgctgaaagccagcaagccgcgcgagcaaaagcgactgcgtggttttggtcgcatgttggtagccctgcaacaaggctacggcaagagtctaaaatgggtgctcaatcatacccgtctggtgggcgtggtgctgcttggcaccattgcgctgaatatctggctgtatatcagcatcccgaaaaccttcttcccggagcaggacactggcgtgttgatgggcgggattcaggcggatcagagtattagctttcaggcgatgcgcggtaagttgcaggatttcatgaaaattatccgtgacgatccggcagtggataatgtcaccggctttacaggcggtagccgagtgaacagcgggatgatgtttatcaccctcaagccacgcgacgaacgcagcgaaacggcgcagcaaattatcgaccgtctgcgcgtaaaactggcgaaagaaccgggggcgaatctgttcctgatggcggtacaggatattcgcgttggtgggcgtcagagcaacgccagctaccagtacacgttgttatccgacgacctggcggcactgcgagaatgggagccgaaaatccgcaaaaaactggcgacgttgccggaactggcggacgtgaactccgatcagcaggataacggcgcggagatgaatctggtttacgaccgcgacaccatggcacggctgggaatcgacgtacaagccgccaacagtctgttaaataacgccttcggtcagcggcaaatcagcaccatttaccagccgatgaaccagtataaagtggtgatggaagtggatccgcgctatacccaggacatcagtgcgctggaaaaaatgttcgttatcaataacgaaggcaaagcgatcccgctgagctatttcgctaaatggcaaccggcgaatgccccactaagcgtgaatcatcagggattaagcgcggccagcaccattagctttaacctgccgaccggaaaaagcctcagcgacgccagtgcggcgatcgatcgcgcaatgacccagcttggtgtgcctagcacggtgcgcggcagttttgccggcacggcgcaggtgttccaggagacgatgaacagccaggtgatcctgattatcgccgccatcgccacggtgtatatcgtgctgggtatcctttacgagagttacgtacatccgctgacgattctctccaccctgcccagcgcgggcgttggagcgctgttggcgctggagctgttcaatgccccgttcagcctaatcgccctgatagggatcatgctattaatcggcatcgtgaagaaaaacgccattatgatggtcgattttgcgcttgaagcccaacggcacggtaacctgacgccgcaggaagctattttccaggcctgtctgctgcgttttcgcccgattatgatgactaccctggcggcgctgtttggtgcgctgccgctggtattgagcggcggcgacggcagcgagctgcggcaacccctggggatcaccattgtcggcggactggtaatgagccagctccttacgctgtataccacgccggtggtgtatctctttttcgaccgtctgcggctgcgttttagccgtaaacctaaacaaacggtaaccgagtaaatgacagatcttcccgacagcacccgttggcaattgtggattgtggctttcggcttctttatgcagagcctggacaccaccatcgtaaacaccgcccttcccagtatggcgcaaagcctcggggaaagtccgttgcatatgcacatggtcattgtctcttatgtgctgaccgtggcggtgatgctgcccgccagcggctggctggcggacaaagtcggcgtgcgcaatattttctttaccgccatcgtgctgtttactctcggtagtctgttttgcgcgctttccggcacgctgaacgaactgttgctggcacgcgcgttacagggcgttggcggcgcgatgatggtgccggtcggcagattgacggtgatgaaaatcgtaccgcgcgagcaatatatggcggcgatgacctttgtcacgttacccggtcaggtcggtccgctgctcggtccggcgctcggcggtctgctggtggagtacgcaagctggcactggatctttttgatcaacattccggtggggattatcggtgcgatcgccacattgctgttaatgccgaactacaccatgcagacgcggcgctttgatctctccggatttttattgctggcggttggcatggcggtattaaccctggcgctggacggcagtaaaggtacaggtttaagcccgctgacgattgcaggcctggtcgcagttggcgtggtggcactggtgctttatctgctgcacgccagaaataacaaccgtgccctgttcagtctgaaactgttccgtactcgtacctttagcctgggcctggcggggagctttgccggacgtattggcagtggcatgttgccctttatgacaccggttttcctgcaaattggcctcggtttcagcccgtttcatgccggactgatgatgatcccgatggtgcttggcagcatgggaatgaagcgaattgtggtacaggtggtgaatcgctttggttatcgtcgggtactggtagcgaccacgctgggtctgagcctggtcaccctgttgtttatgactaccgccctgctgggctggtactacgttttgccgttcgtcctgtttttacaagggatggtcaacagcacgcgtttctcctccatgaacaccctgacgctgaaagatctcccggacaatctggcgagcagcggcaacagcctgctgagcatgattatgcaattgagcatgagtatcggcgtcactatcgccgggctgttgctgggactttttggtagtcagcatgtcagcgtcgacagcggcaccacacaaaccgtctttatgtacacctggcttagcatggcgttgatcatcgcccttccggcgttcatctttgccagagtgccgaacgatacgcatcaaaatgtagctattagccggcgaaaaaggagcgcgcaatgaagttctggcgacccggtattaccggcaaactgtttctggcgattttcgccacctgcattgtcttgctgatcagtatgcactgggcggtgcgtatcagttttgagcgtggctttattgattacatcaagcatggtaatgaacagcgattacaactgttaagtgatgcgcttggcgagcagtatgcgcagcatggcaactggcgcttcctgcgcaacaatgatcgctttgtctttcagatcctgcgtagttttgaacacgataatagcgaagataaacccggcccgggtatgccaccgcacggctggcgtacccagttctgggtggttgatcaaaacaacaaagtgctggttggtccgcgagcgccgattccacctgacggtacacggcgacccattctggtcaacggtgcggaagttggcgcggtgatcgcctcccccgttgagcggttaacgcgcaatactgatatcaatttcgataaacaacagcggcaaaccagctggttgattgtcgccctggcaacgttactcgcggcacttgccacttttctgctggcgcgcggtttactggcaccggtaaaacgacttgtcgatggcacgcacaaactggcggcgggcgatttcactacccgcgtaacgcccaccagtgaagatgaactgggcaaactggcgcaagacttcaaccagcttgccagcacactggagaaaaaccagcaaatgcggcgcgattttatggccgatatttctcacgaactgcgtacgccattagcggtgctgcgcggtgaactggaagccattcaggatggcgtgcgtaaattcacgccggagacggtggcgtctttacaggcggaggtcggtacactgaccaaactggttgacgatctccatcagttgagcatgtctgatgaaggcgctctcgcctatcaaaaagcaccggtagatttgatcccactgctggaagtggcgggcggcgcatttcgcgaacgattcgccagtcgtggcctgaaactgcaattttccctgccagacagtattaccgtatttggcgatcgcgaccgtttaatgcagttattcaataacttactggaaaacagcctgcgctacactgacagcggcggcagcctgcaaatctctgccgggcagcgcgacaaaacggtgcgcctgacctttgccgacagtgcgccaggtgtcagtgacgatcagctacaaaaattgtttgaacgtttttatcgcaccgaaggttcccgcaaccgtgccagcggcggttccgggctggggctggcgatttgcctgaacattgttgaagcacataatggtcgcattattgctgcccatagcccttttggcggggtaagcattacagtagagttaccgctggaacgggatttacagagagaagtatgaccgagttaccaatcgacgaaaacacaccgcgtattttgatcgtggaagatgaaccgaagctggggcagttgctcattgattatctgcgtgctgcgagctatgcgccgacgcttatcagccacggcgatcaggtactgccgtatgtgcgccagacaccaccggatctgatcctgttagatctgatgctccctggcaccgatggcctgacgctgtgccgggaaattcgtcgtttttctgacattccgatcgtgatggtgacggcaaaaatcgaagagatcgatcgcctgctggggctggagattggcgcagatgattatatctgtaagccgtacagcccacgggaagtggtagcgcgcgtcaaaaccattttgcgccgttgcaaaccgcagcgcgagttgcagcaacaggatgctgaaagcccgttgattatcgacgaaggtcgttttcaggctagttggcgcggtaaaatgcttgacctgacgcctgcggaatttcgtctgctgaaaacgctctctcacgaaccaggaaaagtgttctcccgcgagcaattgctcaatcatctttatgacgactaccgcgtagtaaccgaccgcaccatcgacagccacattaaaaacctgcgccgcaagctggaatctctcgacgccgaacagagttttatccgcgccgtttatggcgtcggttaccgctgggaagccgacgcctgccgcatcgtttaattttagcgacattattttgttagccggagatggcgttcagaccagatccggcaacattatcccacgcatggtcagcaaactgacattatctctccgccctggcaggcatcagaaaatcgctcatactttaatcggtaaacagcacctttagaatcctgtcgtttgttttcgatttcaaaatataatgaaattatttgtttttaaatatcgagataacgatcacaaaaacgacaatatgaaaattattcgaggagtgaaaggcaaaaaaacggcctcccgatagggaagccgtagcaaagtgcgcgtgtttttatgccggatgcggtgtaaacatacgtggcagtgctatgtaggcatgataagacgcttcagcgtcgcatcaggcataggttgccggatgcagcgtaaacgccttatccgtcctacggggtggtgttgttcgtataaggcgtatcaggcgatagtaattttgctatcgagataaacgtcctgcacggcgttaatcagtttcacgccgtcagccatgcttttcttgaacgctttacgtccaagaatcagccccattccgcctgcgcgtttgttgataaccgcagtacgcactgcatcgctgaggtcagtttcaccgcccgcagcaccgccggagtttatcaacccagcccgacccatatagcagttagctaactgataacgcaccagatcaatcgggttttcgctggtcaatttgctgtaaacacgatcgtcggtgtaaccgtaattaattgctttatagccgccgttattttccgccattttttgtttgacgatatctgcaccgatggttgccgccagatggtttgcctgaccggtcaggtcggcggaaacatggtaatcaacgccatctttcttaaaggcggagttacgcaaataggcccacagcactgtcaccatacccagctcgtgcgcacgttcaaaagccgcagaaatttcttcaatctggcgacgactctcttcgctgccaaaatagatagtcgcaccaaccgcaaccgcgcccatgttgaacgcctgctccacgctggcatacagcgtttgatcgtaggtattcgggtaacttagcgtctcgttgtgattaagtttgacgaggaatggaatgcgatgcgcataacgccggcttacgctcgccagcacgccgtaagtactcgccacacagttacagcccgcttcgatcgccagttcaacaatgtttttcgggtcaaagtagagcgggttagcagcaaaactagctccggcagagtgctcaacgccctggtcaaccggcagaatagaaagatatcctgtgccagccagacgcccggtgttgtacaacgtctgcatattacgtaacaccgctggcgggcgattattgtcaatcattacgcggtctacgtagtcatgtccggggagataaagctggtcagaaggaattgtcatacaacggtgctgtaaaaggttgtcggcgtctttgccaagcaactgcgcaatatctgtcattactatgctcccgtaaattccgattggatatcggctatggattgtcctggcccgccttttgcgggcaatcataatcctggtcgttacgggcgagtttttccatcttttggatgttttttcagcgttttctgttggctcgattcatcagaaaaaatgttagcgcggtcaagttttcaccgcaaaggtatttaaaaggtattattaagtggtattgtcatcgcgtaccttacattacctgtcatgaaggaattaaaagatgaaaacaacagcaaagctgagcttcatgatgtttgttgaatggtttatctggggcgcgtggtttgtgccattgtggttgtggttaagtaaaagcggttttagtgccggagaaattggctggagctatgcctgtaccgccattgcggcgatcctgagcccaattctggttggctccatcactgaccgctttttcagcgcgcaaaaagtgctggcggtattgatgttcgcaggcgcgctgctgatgtatttcgctgcgcaacagaccacttttgccgggttcttcccgttactgctggcctacagcctaacctatatgccgaccattgcgctgactaacagcatcgcttttgccaacgtgccggatgttgagcgtgatttcccgcgcattcgtgtgatgggcactatcggctggattgcctccggtctggcatgtggtttcttgccgcaaatactggggtatgccgatatcagtccgactaacatcccgctgctgattaccgccggaagttctgctctgctcggtgtgtttgcgtttttcctgcccgacacgccaccaaaaagcaccggcaaaatggatattaaagtcatgctcggcctggatgcgctgatcctgctgcgcgataaaaacttcctcgtctttttcttctgtagtttcctgtttgcgatgccactagcgttctattacatctttgccaacggttatctgaccgaagttggcatgaaaaacgccaccggctggatgacgctcggccagttctctgaaatcttctttatgctggcattgccgtttttcactaaacgctttggtatcaaaaaggtattattgcttggtctggtcaccgctgcgatccgctatggcttctttatttacggtagtgcggatgaatatttcacctacgcgttactgttcctcggtattttgcttcacggcgtaagttacgatttttactacgttaccgcttacatctatgtcgataaaaaagcccccgtgcatatgcgtaccgctgcgcaggggctgatcacgctctgctgccagggcttcggcagtttgctcggctatcgtcttggcggtgtgatgatggaaaagatgttcgcttatcaggaaccggtaaacggactgactttcaactggtccgggatgtggactttcggcgcggtgatgattgccattatcgccgtgctgttcatgatttttttccgcgaatccgacaacgaaattacggctatcaaggtcgatgatcgcgatattgcgttgacacaaggggaagttaaatgaaaacagaacgtattctcggtgctctttatgggcaggcgttaggggatgcgatggggatgccctccgagctttggccacgcagccgcgttaaagcacactttggctggattgaccgttttcttcctggaccaaaggagaataacgcggcctgttattttaaccgcgccgaattcaccgacgataccagcatggcgctgtgtctggcggatgcgttactggaacgtgaaggcaagatcgatccggatctgattgggcgtaatattctcgactgggcgctgcgtttcgacgcctttaacaaaaacgtactaggtccgaccagcaagattgcgcttaacgccattcgcgacggtaaacccgttgctgaactggaaaacaacggcgtgaccaacggcgcagcgatgcgcgtcagcccattaggttgtttgcttccggcgcgtgatgttgattcctttattgatgatgtagcgctggcgtccagcccgacccataaatccgatctggcggttgcaggcgcggtagtcatcgcatgggcgatttctcgtgccattgacggagaaagctggagtgcgattgttgattccctgcctagtattgcgcgacatgcacagcaaaaacgcatcactacgttcagcgccagtctggcggcgcggctggagattgcgctgaaaattgtgcgcaatgccgacggcaccgaatccgccagcgaacagctttaccaggtcgttggcgcaggtaccagcactattgagtccgttccgtgcgccattgcgctggttgaactggcacaaaccgacccgaatcgctgcgccgtcctgtgcgctaaccttggcggcgacacagacaccatcggtgctatggcgacggcaatttgcggcgcgttgcatggcgttaacgctatcgatcctgcgttaaaggcggaactggatgcggtaaatcagcttgatttcaaccgctatgccacagcgctggcgaaatatcgtcaacaacgggaggcggtatgagcggcgctcgattacacacgctgctgcctgaattaaccacgcgtcagagcgtgatggtcgtcggcgcggcggtcattgacgtgatcgccgacgcttatgccctcccctggcgtgggtgcgatatcgaactgaaacagcagagcgttaacgttggcggctgcgcactgaatattgccgtggcgttaaagcgcctcggcatcgaagcgggtaatgccttgccgctcggtcagggcgtgtgggcggagatgattcgcaaccggatggcaaaagagggcttaatcagcctgatcgataacgccgaaggtgataacggctggtgtctggcgctggttgagccggatggcgaacgcacttttatgagtttcagcggtgttgaaaatcagtggaatcgccagtggctggcgcgattaaccgttgcgcctggcagcctgctctatttttccggttatcaactggccagcccctgcggcgaattgttagtggaatggctggaagagctgcaagacgtgacgccgtttatcgattttggcccacgtattggcgatatcccggatgcattactggcgcggatcatggcctgtcgacctttagtgagcctcaatcgtcaagaggctgagattgccgccgaacgttttgctttatccgcagagataacaacacttggcaagcaatggcaggagaaatttgccgcgccgttgatcgttcgtctcgataaagaaggcgcatggtatttcagcaacgacgcttctggctgcattccggcatttccaacgcaagttgtcgacaccattggggcgggcgacagtcatgccggtggcgtacttgccgggctggcctctggtctgccactggcggatgccgtattactgggcaatgcagtggcgagctgggttgtcgggcatcggggcggtgattgtgcgccaacgcgcgaggaactactcctcgcacacaaaaacgtataattactcctcgcacacaaaaacgtatagatcgctgcgacagtggctaatgctgtactcaataggccgttgctgttggtcaagcgccacttgcttgatcaccagcaccggtattttgctatctaactgaatatgactctgaaactcggcatccggcatccgggcgctaacgcgggaacgcgtacgttgtgggtaaatgtgctggctgcggaaatagtcataaagactaatcccgatggcatcaacatcatgaattaaatgcgccggaacccagctttcctcaatgcttaccgcttcttcatcgacatagcgaatacgcttaagcaaaaagacatcacttcctgcttcgaccgccagctgctgcgcgacttcttcgggacatttcacgacacgcttgttaacccatagcgtatcgggctttttcccgcgcaataccacctgctgagaaaaacctcgcgcttctttcaagctgtattcgaagatgttgttgatctgcgtgccgtaaccgcggctacgcgtcaccacaccctcttcttccagcgcctgcatcgccttgcgcaccgtaatgcggctaacgccggttaactgacttaaatcacgttcaccgggcaaaatattgccatgctccagcaccccgctgcgcacggcattttttaccgtttcggcaaacttaatataaagcggcgtgttatccgccgctaaaatacgctcgttcagttgggcaatcagctgggtatgcgcttgttccatttgtctttttcctgccggggagtctggtgggagtatatcactgcttcttatttaaggcgtttctttaatcccatcaacgaatgcctgcaactcctccaccgtgccattaaatacattaaaatccaccggaccattgatgccatctacctgtccacggtcggaatgctgccagaagcgccaggccattccgtcattgtccggacgacgttgatagtagtgagccacccaccacggatattcattgaaatagcccgccagattggtgtgataaaaaacggctccactgtaaataatcggctttttccccgtacttttttcgaccatttttagccactgacttacccgcttgcgtaattcttttgcgcttaattttccccgttcttctacgtccagcacggcagggaaatcgccttgactgaaatccaccgtttgcagaaataatctcgcctgaacactagcggatacgctcggggagaaataatgatacgccccacgcagcaggccattttcgcggcttagttgccagttacggctaaaataggggtccaccagcttttcgccttccgtcgccttaataaaagcaaactgtaagcggataccattgtcgcgcatttttgccacccgctgccagtcgatccgctcctgccagcggctaacatctattccgtgaatggtgtaactggcaggaatgcgaatagcgaaagatttaaccgggcgataaccgtagaagtggatgtagtctgtaatctgaactgctgtgctatagaaaaaattcaccgtctgacgcggataaattgcaacgatggaaattagcccaagagcgcataatagagaggtgagtttttttcgactggtaattcttagctgcattggtttcatccctgaatgtcagtgccaaaggctgacaataaccaaagcagctatagtacggcgctcaccaccaggcgtggaagtggtgaaccggaccaataccgtgaccaacttccagcgtgtcggcctgggctaacgcgctactaagccagctttttgcctcctgtacggtgtcagcccagtttgtatggcgcgggcgtagtgcagccaacgccgcagagagtgtacaaccagtgccgtgggtgtttttggtcataatgcgcggtgcggtaaaccgttgttcaccctcgcgggtaaacagccagtccgggctttgctcatcatccagatgaccacctttcattagcactgcgccacagcccatcgccaacaggcttcgcccttgttccagcatttcctgttcggtgcgcgcgtgtggcgcgtcgagcaaggcggcagcttcgggcaagtttggcgttattaaactaacctgtggcaataatcgactgcgcagcgtagcaaccgcgctaggactaagcagcgggtcgccgctttttgccagcataacggtgtcgagtaccacgttttggatctgataacgttgcaaccgttctgccaccgcttcaacaatatcggtttccgccagcataccgattttagtggtatcgattcgcacatcgctgaacacgctatcgagctgggcggcgacaaaatcaggctcaatgcgatacacgctctgtacgccacgggtattttgcgccaccagtgcagtaataacactgcaaccataagcgccaagtgcgctgaaggttttaagatcggcctgaatccccgcaccaccactcggatcagtaccggcaatcgtcagagcgttaattcgtttcatgcctgcacctcctgcgtcaattgccagagcgcatcaaggaaatgtggaacaaaactgcctggcccctcgcttctggcgactgcgcgttctccggcttgtttcatccagtgacaggcagatgcgacattttccagcgtatcgcctggtaacgcacagcaggcagcgacaaccgcgcttaatgcacagccagttcctaccactttggtcattaacggatcaccaccgtgaataccaatgatacgatgtccatcggtaacataatccatctcgccagtgaccacgacgattgcgccagtttcccgtgccagtgtttgtgcagcgggtatcgcgttagctgcggcgtcagtggtatccactccccgtccgccattagcaatgccagctaatgccatgatttcgctagcattaccacgtatcgctgccggtttaaaagataaaagttcatgacaaaaatggcggcgataatcgagcgcacccaccgctactggatcaagcgtccagggtgtttgagagctttttgcttgctcaacggcagcacgcatcgcctgagcgcgtggctgcgtcagtgtgccaacgttaatcaacaaggcactggcgatagccgcaaactgactggcctcttcggtttcgataaccatcgctgggcttgcaccgagcgccagcaaggtattggcggtaaaggtttgcaccacatcattggtcatgcagtgcacaagaggggaatgttggtgaaaaaggtgtaacgcgtgcgcagattgcgcactacccagcaggtcgacttgcatagtttgctcctgccataacgtgaagaagcaatgacctggtggtccgtgacttccctacgctggcattatccagatcaggtgatacgggtatttctcagccttcacgcagaagggcaccccgagtcgtttggttgcgatgataaatcgcagaggaggatggtaatgtccagcgcacgcgttgtaaacgaggaaaaacggcagttttacaatcgcgttaataaattatttgatataactatccagcaccttcagaacgacatccagatcttcttcacgttttagctcatccccctggtgaacgatgtgttccgtcagatgacctttaatcacttcccgcatcagaccgtttaccgcgccacggatagcagcaatctgttgtaaaactgcagcgcattcgtgcggctcgtcgagcattttcttgagcgccacgacctggccctgaatcttactggcacgcgctttcagtttctgtttatcacggattgtatgagacatggcaacacctggttaacaagaatatgaaaaatcatagcactattaatctactggggggtagtatcaggtactgggggggagtagaatcagattgccgaattaatactaagaattattatcatgaccgaatttacaactcttcttcagcaaggaaacgcctggttcttcatccccagcgccatcttacttggtgcgcttcatggcctggaaccagggcacagtaaaacgatgatggcggcgtttatcatcgccatcaaaggcaccattaaacaagcggtgatgctcggactggcagcaactattagccataccgcagtggtctggttaattgcctttggcgggatggtgatcagcaagcgctttactgctcaaagtgcagaaccgtggctccagctgatttccgcagtgatcattattagcaccgcgttctggatgttctggcgtacctggcgcggcgaacgcaactggctggagaatatgcacgggcatgattatgagcatcatcatcacgatcacgaacatcaccacgaccatggacatcatcaccatcacgaacatggcgagtatcaggatgcccatgcacgagcccatgccaatgacattaaacgacgctttgatggtagagaggtcaccaactggcaaattttgttatttggcttaaccggtggccttatcccctgcccggcagcaattaccgtgctgttgatatgcattcagttgaaagccctgacactgggcgcaacactggtcgtcagtttcagcattggcctggcgttaacgcttgtcaccgtaggcgttggcgcagcaatcagcgttcagcaggtcgcaaaacgctggagcggatttaacactctcgctaaacgcgccccctatttttccagtctgttgattggcttagtcggtgtgtatatgggcgtacatggcttcatgggcataatgcgataactcaatcctttaggcttgcatgttatcttcagcccaggatgattcttaaatcagctatttccgctgactctctgctcgctaaggatgcttttagggcatcctttcatttacactttttacgaaatcatgggatcactaacaaaatatcgcttgtcagttatattgtatggcaggaaagatatgcgactgatattacagatccccaaagtggagagtttatgaccattaaaaataagatgttgctgggtgcgcttttgctggttaccagtgccgcctgggccgcaccagccaccgcgggtagcaccaataccagcggaatttctaagtatgagttaagtagtttcattgctgactttaagcatttcaaaccaggggacaccgtaccagaaatgtaccgtaccgatgagtacaacattaagcagtggcagttgcgtaacctgcccgcgcctgatgccgggacgcactggacctatatgggtggcgcgtacgtgttgatcagcgacaccgacggtaaaatcattaaagcctacgacggtgagattttttatcatcgctaaaaaaagccccctcatcatgagggggaaatgcagacaccttgttattttttattattagccacttgctcgtcttgcttgttattagtcgtatttcacgttgattaatgcggttgcctccagtgcgccagatttaactttgtttgtatcgtagacgtagtaactggctgttatcggaatactaaccgttgtatctgtaagtttactcttcgccgcaacttcctttaaatttgtatatcctttactgctgttagtgatatttaaaagtgtgactgggctaccattactttcaagaataaatcctacgccattatcttccgcacctttcagtattgtgttgctgttggttaacaagtcagaactacttaaatacacctgcattttccgacttgtttgattttgttgacctaataaatttttacaacgcagaataatatccccttgtttactatttattgttgctttgttacctgtggctggtaattgactaacgggaatactgtctaaagtaattaataaatcgtccggtttgcaggttgtggttatcgggttgtaactcaatgtcagattaaaggaatagacacctgcattttgtgccaatgcatttctgtagctatttacacatgcatcccaactcttgccacctaataaacacagtagaaattgtactgcggcactcccgcgtgtgctactactagcactggataatgtcgcaacaccattaatcatcacactaccgccgccccccgcagaaacattcacttttgcattactggccgcaggtgtcaccgtaacactataaccactggtgaaactggtctgattattactcaacgtgatgttgtttttattggtccattcaaaatgtaaatttaattttatggtatcgttataaagtccaacaataatatcgctcgggctcataggggtgatagtatttgtacttacgcaactgctatcattaaaattatgctcatatgtcgccatttgtgtttgagtaagtgcaaaatccccctgaacaaccaagttgtgctgaacagataactcactataacatgccgcatagctcacaggcataaccatcatcattaatataaatagcattatgcgaatttccatagaaccacctgactattactggcaaatataatttctactttcatcaatctctttaccgaaggtgattgtgcaactaagtccttgttgcttatcaattgccacattaacgcttggcggtacttcattggtgcgaataaataactgacttccctggccgacaacgccaatattatgaccatggatatcattgacttcataaccaaacgttaaactttgcccatctgctcttaacgcttttataaaccatggcttgcgctgatcggtatcaaaattaaccagtacaaccgcgccgcgataaggggcggcaattttccggttgccacgtaattctgcttcgctatcgctttggctcacatccagcatcaggtgattttcccgataaggtgtcattccgtcgtatatcaccactccattacggtttgttgtgcgatatttttgcccattgacataagcatctttaattcctggcgcattcatcacagcaaacgtttcggaaagacggttcgccagattaacgccaccgctccaggcgacaatgcccccactaacactggctccagcctgtcgataagtactgctctgactataactgccattcactgtcgcaaccggcgcgttccaggtcaaattcgccccagctgtcgtttcatttccctgatgttgatgactcaggttgacaccataattgaactgatcccgactccctactgttccacttaatcccgtattattactggcaaacccctgatcatcaaacgtcgtactgttagacatatatatttgccgacgaggcgtgctaacgtcatcaccccaatcaaagggaatgcttataaaaatattaaaacgtttctcttcatgatgattctcgtcataagcctggcttgccgcgagggtatagcttatccgtcgcaggttgttggaataactcaactgataatccttactactgccgctacgcccccagtaatctcgccataacgtacttaaactcacagacccccaaccttctggcaaactctggctcatattggcggaaaagctatttttgcggccaaaatcgttctggtaataatcggcaatgtcatagacatcgttttcatcacggcgataattatctttattgtttgcccaaacgtgatcgttaaatgtccggtaatcacggctgctataacgccaggccgccagaccaaaacgcgtgctcgtttggctcacaaacttgttgtaggcaatttgataactttgcccgtcaaacacatcgccgttgtcttgtttactatggctcttagtggcatcgacggaaatggcaccaatgcgtgtattccagccagcccccaaagtaaacgcgtaataattattcgcgaccatgctgccaccatacagcgtcaataaattattaaaaccatactgataacccgcctggacaaaatcactttgtttgctcgccccttcaatatggctacgacccgccgctaaatcatatttgctcacgccgggttgcagcatatttggcaccgctgcataaggcaccagataggtggttacgctgccgtccgcctctttcacgctgacatcaagatctgctccaccaccggccaactgcaaatctgtaatcgcgaacgggccaggaggaacctctttctgataaaccacaaaaccattctgttcaatagttaccagcgcgttactctgagcaatcccctgcacccgtggcgtaaaattttgtttgctgttaggcaacatctgcatatcacgaaacaaccgcacacctctgaagcgaacagaatcaaaaatatcgctacttgtgtacatatcacccacgcgaagcgtgccgagaagttgggcaaatccacgttccagatacagggtattgcttttccacacccctggattgttatttgttttactgaaactggcatcagaatgcagttgccaccccagtaaatttaacccgctgttaaaacgtacatatgtactcttgttattaccgctcgctttatagtcgctgtaatactgactcagataataagaggtataaaacgcattaataccccgctcccagttttccggtggaacatagccactttccagttcttccacccaggcctgcgggacactgaaatcgagacgaaaaaccccgatatcccaggtatagctcccaccctgaacaagttgctcaaatgttaaacattgcttaccgctggcgaagttatcgctattaatgcctaaccgcttgataacttctctacttaaacatgtttcttgcgggttgtctttaacaataatctcatatttcccgcgccattgcttattgacataaatatcgatgtcatactgccccggtaagggttgattatcatcaagacgaatatttgcaacctgctggtctttcattccacctatcataaaatgggtatcaaaggtttcttcagctgcataagcttcaatgccgagcaataacgctacgattgcacttgcaagtggggtcattctcaacataggcagctcctgcaattaaattttgtcactaatatagttgccatggtcatcgataatggtcagatgccagttatttgcattattacttttgacattaacactctgactttctaagggggcaatcataatagtttcataattgactttgacattattagctttgacatcgctaatcgtcacccaattagcactgtcattttttatcaccaaaccattgccactgcgatttaccagcaattttttaaatgtcgctttatttaccggagcaatacccgctggccggtaaaacaacttaattctgttttgcatcgcaaacttcagtgcattcttaccttcttgctctggactatttggtggaatatccagaacattcagataaaaaatgctttctttattagtgggcagtttattcggcataattttgatttttacttgctgcccggaatttgcccctatttttgccactggtggcgttaacatgaaaggaacctgaattttttctggtggtaaactcgtatcgccatcatcaatccacgcctgcagcaggctagaacggtttccctggttcatcaactgcaccatcacttctttattttctgccgggtaaataatgcgcgtcccgtagataacaattccggcatgtgcaggaaggaccatagaaaaaatgagtaaagataataatcctttcattttaatgcctcttaaattaaaaggccgccatgggatagcggccatgtttattacctggagaaacttacaattttatttattaatcctgcgccacacgcataaccagagaagataacacatcaccactttgcacactgttatctgtcagtttcaggtattttgctttaaacggaatagcatattgaccttccgctgttttataactctcaatgttaaaaggtgcagaaacatccaggacatcgctgttatcacctaaatagagatagtaacccacggtatcgttgctactggctatcgccttatcgttaccggttattttatcgttggtaatcaagctgagttttacaccagcaacttctttcgggcagctaatttttaacatgctgctggttacaccgactgcatcatcataggtagaatatttagctttaccttcaaagacactggttggtacagtcggcatattaatacttacactatcaccacccgcttcgaatttacacggagattctgcaatattccccttaatagttaatgttccggtatcaacgtctgcagcaaatactccagcgctcataaaaaaagaagaaaagacagcggcagcaataatactacgtttcataatatgttccttaataaaatttatttttggttgttaagagtctgtatctcttggaaacaaatttctcacatcaaaaaagttgccgcaatgtaaacacattgttttattgatttaaaacaaattaaccattgcaatataaatacaaaaaatatttaagagtattaactatttatcgcatctatcaattaatgtagatttatgtaaatggtattgttgatatcaataaaaaagccgaaatcatttatataaatgatttcggctttctaaatgcaattaaaatcaggttgccaaattaatcgtagcgatttaacacgattcgacgtttgctatcgctacctgcaacaaccacttctgtcgttacacctttgacggggctagaaaacagatgacgggtgtcaacattatacgttaactgaccacaatgctgttgaggttgaccattaaccatagccatactgcatgttgggggactgatcctgccattaatcgctaatgtggcagtctcactagagaatgcgggagaagccaatccataggcaagaaaaataattccactcagccaatacttattcattgaacgttatccctgtagtaaaggttatgcctggatagaatgagtgcataacaaactatagctgtacatccactacacagccacgaaggatgataatgaagcattgcctgtatgatcaatcgactttgtagagtttcggacgaaggtccgcagaatattcgcagtattaaataagtgttcattaatgcggcaaaaactaatacaccgcatcaatgtaacatctctgcggtgtatgaagaataaccagaatggttaataggcgttagaccgcgcggaaggaaatctcgcctggaatgacttcaccctgccagtagagctgagctgcaacgcggtcagccagctggcggtagatagcggtaaattcgctctccggacggctgataaccgttggcgtacctttatcgagatcctcacgtaaggagatgtgtaacggcatctgccccagcagctgtgtatggtatttttcagccagtttctctgcaccaccggtaccgaaaatcggttcatggtgaccacagttactgcaaatatgcacactcatgttctcgacaataccgagcaccggaacctcgactttctcgaacatcacaatgccttttttcgcatcgatcagcgcgatgtcctgcggggtggtgaccacgactgcaccggttactggaatgttttgcgccagcgtcaattgaatgtcaccggtgcctggcggcatatcaagcaccagatagtcgagatccggccacaaggtttcctgcaacatctgcattaacgccttgctcgccatcggtccacgccacaccatcgcattgtcgtcagtgaccagataaccaatactattggttgccaggccatgagacataatcggtgccatatgggtaccgtccgggctagttggacgctgattttctgcgcccaacattgttgggatacttgggccgtagatatcggcgtccagaatgccgactttcgccccttctgccgccagcgccagtgccaggtttaccgccgtggagcttttacccacgccgcctttaccggaactcaccgcgataatgttcttcacaccgttaattcccggctgattcttcacgcgtttcagagtggctatgttatggctcagtttccagtcgatagctttcgccccggtgatgcgcagcagttcggcgctacattgctcttttaactcttcgaacgcgctatgccagacaaacggcataaccagttccacatgcaacgtgtcgtccatccaggcgacatggtgcaacgctttcagcgtggtgaggttatgcttcagggttgggtgctgaaaattggccagtgtcccggcgaccattgcgcgcaaggcttctggacttttggcctgggattgttcgttcatcccgactccttttttgtatagataaaccatcagctgatagtttacctgaagaatatagagaagtacttacttaacattttcccatttggtactatctaaccccttttcactattaagaagtaatgcctactatgactcaagtcgcgaagaaaattctggtgacgtgcgcactgccgtacgctaacggcagtatccacctcggccatatgctggagcacatccaggctgatgtctgggtccgttaccagcgaatgcgcggccacgaggtcaacttcatctgcgccgacgatgcccacggtacaccgatcatgctgaaagctcagcagcttggtatcaccccggagcagatgattggcgaaatgagtcaggagcatcagactgatttcgcaggctttaacatcagctatgacaactatcacagcacgcacagcgaagagaaccgccagttgagtgaacttatctactctcgcctgaaagaaaacggttttattaaaaaccgcaccatctctcagctgtacgatccggaaaaaggcatgttcctgccggaccgttttgtgaaaggcacctgcccgaaatgtaaatccccggatcaatacggcgataactgcgaagtctgcggcgcgacctacagcccgactgaactgatcgagccgaaaagcgtggtttctggcgctacgccggtaatgcgtgattctgaacacttcttctttgatctgccctctttcagcgaaatgttgcaggcatggacccgcagcggtgcgttgcaggagcaggtggcaaataaaatgcaggagtggtttgaatctggcctgcaacagtgggatatctcccgcgacgccccttacttcggttttgaaattccgaacgcgccgggcaaatatttctacgtctggctggacgcaccgattggctacatgggttctttcaagaatctgtgcgacaagcgcggcgacagcgtaagcttcgatgaatactggaagaaagactccaccgccgagctgtaccacttcatcggtaaagatattgtttacttccacagcctgttctggcctgccatgctggaaggcagcaacttccgcaagccgtccaacctgtttgttcatggctatgtgacggtgaacggcgcaaagatgtccaagtctcgcggcacctttattaaagccagcacctggctgaatcattttgacgcagacagcctgcgttactactacactgcgaaactctctagccgcattgatgatatcgatctcaacctggaagatttcgttcagcgtgtgaatgccgatatcgttaacaaagtggttaacctggcctcccgtaatgcgggctttatcaacaagcgttttgacggcgtgctggcaagcgaactggctgacccgcagttgtacaaaaccttcactgatgccgctgaagtgattggtgaagcgtgggaaagccgtgaatttggtaaagccgtgcgcgaaatcatggcgctggctgatctggctaaccgctatgtcgatgaacaggctccgtgggtggtggcgaaacaggaaggccgcgatgccgacctgcaggcaatttgcagtatgggcatcaacctgttccgcgtgctgatgacttacctgaagccggtactgccgaaactgaccgagcgtgcagaagcattcctcaatacggaactgacctgggatggtatccagcaaccgctgctgggccacaaagtgaatccgttcaaggcgctgtataaccgcatcgatatgaggcaggttgaagcactggtggaagcctctaaagaagaagtaaaagccgctgccgcgccggtaactggcccgctggcagatgatccgattcaggaaaccatcacctttgacgacttcgctaaagttgacctgcgcgtggcgctgattgaaaacgcagagtttgttgaaggttctgacaaactgctgcgcctgacgctggatctcggcggtgaaaaacgcaatgtcttctccggtattcgttctgcttacccggatccgcaggcactgattggtcgtcacaccattatggtggctaacctggcaccacgtaaaatgcgcttcggtatctctgaaggcatggtgatggctgccggtcctggcgggaaagatattttcctgctaagcccggatgccggtgctaaaccgggtcatcaggtgaaataatcccccttcaaggcgctgcatcgacagcgccttttctttataaattcctaaagttgttttcttgcgattttgtctctctctaacccgcataaatactggtagcatctgcattcaactggataaaattacagggatgcagaatgagacactttatctatcaggacgaaaaatcacataaattcagggcagttgagcaacagggaaacgagttgcatatcagttggggaaaagttggcaccaaagggcaaagccagataaaaagtttttcagatgctgcggcagcggcaaaagcggagcttaagctgattgcggagaaggtgaagaaggggtatgtggagcaagcgaaggataattctttgcaaccttcccaaacggtaacgggctctctcaaggtagcggacttatccaccattattcaggaacaaccctctttcgtagcagaaacccgtgcgcctgacaaaaatacagatgctgttttaccgtggctggcgaaagatattgctgtcgtttttccgcccgaagttgtacacaccacgttaagtcatcgccgctttcccggagttcctgttcagcaagcagacaaattgccccaattacgtcgcttagcctgtagtgtgtcgcaacgggataataaaacagccacatttgacttcagcgcctgttctttagaatggcaaaacaccgtcgcccaggcgatcagtcagatcgacggcctgaaaacaacacagttaccatcaccagtaatggctgtactcacggcacttgaaatgaaatgcacaagatataaagtgcgtgaggatgttatggatcagatcgtccaggaaggcggtctggaatatgctactgatgtaataatacaccttcaacagattgatattgaatgggattatgcgaataatgtcattattattctgccgtctggcattgcacctagctacttggagcaatattccagatttgaatgacgcctacgtaaacatttatcactgacggaagagtctctctggcaaaaatgtgcacaaaaacttattgccgcaattccacatattccagaatggcggcaaccattaattgctttgttattacccgaaaaaccagaaattgcacatgaaattgcccagcgtctactggggcaaaaaaaattaccctcgcttgagtggttaaaaatagtggcgactgatgagcacattcttgcctcattagaaaaatatcacgaaccatatgccatttttgatgattactattgtggtgcgatatggtcagccaccgtattacaggagcaaggtgttgcagccctgccccgatttgctccctatgccgcaagtgactactgcgccgatgtgttgcgtcatatcaatcatccgttcgcattgacactgcttatacgtgtagccgggcaaactaaacgctgtcacgatcggatgacgaaagccattgctgcgttcccacatgcagcaatggcggcactgacggaacttcttgggcaaaaagaagagaacagttggcgcattatgctaatgacaatgcttatctcacaaccagcactggcagaacaggtcattccctggctctcgacacccgcagttgccgtactgaaatcatgccagcaacaactgacacagccctcaaaccatgccagcgccgatctactgccagccgtagtagtctcccctccctggctttcgaaaaagaaaaaatcgccgattccggtgctggatttagcgccattaggcattgagccaatctgttatctgacagaagaaatcagtaatcaacttttggcgaaatatatctggtattcaaaacacatcacggttagccatgaagaaagtactaccaacctgttggcaaggatgggttttcaacgacggatcgctggtacatatattaaagctcccgaagcggtagttgaggcatggctaaatgaagattattcaaccttactaagtgaatttaaggtgtttcattcacctaccgggcattattggcagttggggattttgacaacattgccgctggagaaagcagtaaaagcatggaatgcccttaccctatctccacataccgataccgaatactccatgttacattttggactcaaagggttacctgggttagtaaactcacttgcacgctatccacaagaagccttgcccatcacgaattacttcgcagcgagtgagctggctcctgccgtcgcccgtgccttcaacaaactgaaaacgctacgcgaaaacgcccgtagctggctgttgaaatacccggaacatgcccttaccggcctgctgcctgcggcgctcggcaaagccggtgaagcacaggataacgcccgcgctgccttgcgtatgcttaccgaaaacggtcatcagccattactgcaagaaatcgcccgacgttataaccagccggaagtaaccgatgcggtgaacgctctgcttgcgctcgatcccttagataatcacccgacaaaaatccccactcttccggccttttatcagccatcgctctggacgcgcccggtattaaaagcaaatgcccaatcactgccagatagcgccctcctccaccttcggtgaaatgctccgcttccctcaggaagaggctctgtatccgggattattgcaggtgaaagacgtctgttccgccgactcactggcgggatttgcctgggatctgtttaccgcctggcagaccgctggcgcgccgtcgaaagagagttgggcgttcactgcgttaggcgttctcggtaacgatgacaccgcccgcaaactgacgccattaatacgcgcctggcctggtgaatcccagcataaacgcgccaccgttgggttggatattctcgctgctatcggtagtgatatcgcccttatgcagcttaacggcatcgcccagaaactgaaattcaaagcattacaggagcgggcaaaagaaaaaattgccgacattgccgagagccgcgaactcacggtggcggagcttgaagatcgggttagcaccggatctcggtctggatgataacggttcgctgctgctggattttggcccacggcagttcaccgtcagctttgatgaaaccttaaaaccgtttgtgcgtgatgtttccggcagccgcctgaaagacctgcccaaaccgaacaaaagcgatgatgaaacgcgggcgaacgatgcggttaaccgctacaaattgctgaaaaaagatgcgcgtaccatcgccgcccagcaggtagcaaggctggaatccgccatgtgcctgcgccgccgctggtcgctggaaaacttccagctcttcctggttgagcatccgctggttcgtcacttaacccgccgtctgatttggggcgtttatagcgccgaaaaccagctactggcttgctttcgcgtagcagaagataacagctccagcaccgctgacgatgatcttttcaccctgccggaaggcgatatctctatcggcactcctcacgttctggaaatatcaccaacggatgctgccgcctttggtcagctttttgccgactacgaactgctaccaccgttccgccagctcgaccgtaacagctacgccctgacagaagccgagcgcaatgccagtgaactgacccgctgggcaggcagaaaatgcccgagtggtcgggtcatggggctggcgaataaaggctggataaagggcgaaccacaggatggaggctggatcggatggatgatcaaacctttgggtcgctggtcgttaatcatggaaatcgatgaaggctttgcggtaggcatgtcgccagccgaactcagcgctgagcagctcttaagcaagctgtggctatgggaaggcaaagcagaaagatatggctgggggagtaattcaacacaggaagcgcagttctccgtaatcgatgccatcaccgccagcgagctaattaacgatattgaagccctgtttgaataaggaaagagcatggacaaggaattaccgtggctggcggataacgcccaactggaactgaaatataaaaaaggcaaaacgccgctcagtcatcgtcgctggccgggcgaaccagtgtccgttatcactggaagtctcatccagacattgggtgatgaattgctacaaaaagctgagaagaaaaaaaacattgtctggcgttatgagaattttagtctggagtggcagtccgccatcacgcaggccatcaacttgatcggcgaacacaaacccagtatcccggcccggacaatggcggcgctagcctgtatcgcgcaaaatgacagccaacagttgctcgacgaaatcgtccaacaagaggggctggaatatgcgactgaggtggtgattgcacgccagtttattgcgcggtgttatgagagtgatcctctggtagtgacattgcagtatcaggacgaggattatggctatggttatcgcagtgaaacctataacgaattcgatctccgactgcgtaagcatctctctctggcagaggaaagctgctggcagcgttgcgccgacaaactcattgccgcactaccaggaataaacaaagttcgccgcccttttattgcgctgatcctcccggaaaaaccagaaatagccaatgagttggtaggccttgaatgcccgcgaactcattttcattctaaggagtggttaaaagttgttgctaatgaccccacagcggtgagaaaactcgaacactactggagccaggatatatttagcgatcgagaagccagctacatgagccatgaaaaccacttcggctacgcggcctgcgccgcccttttgcgcgaacaaggactggcagccattccgcgcctcgcgatgtatgcccataaagaagattgcggcagtctgctggtacaaattaaccatccgcaagtcatccgcaccttgctactggtggctgataaaaacaaacccagcctgcaacgtgtagctaaataccataaaaacttcccccatgcgacgctcgccgcactggcagaactgctggcgttaacagaaccaccagcccgccctggttatccaatcatcgaagacaaaaagctgcctgcacagcaaaaagcacgcgatgaatactggcgtacgctgttacaaacgctgatggcaagccagccacaactggcagcagaagtgatgccgtggttaagtactcaaccccagagtgtgctgaagagttatttaagcgcaccgcccaaaccggttattgatggcaccgataacagcaatctgccagaaatcctcgttagtccaccgtggcgtagtaagaaaaaaatgacagctccacgtcttgatttggcaccgctcgaattaactccgcaagtttactggcaaccaggcgaacaagagaggcttgccgccactgagcctgcccgttatttcagcacggaatctcttgcgcaacgcatggaacaaaaaagtggacgagttgtattacaggaactgggttttggggatgatgtatggctgtttctgaattatatactccccggaaaactggatgctgcacgcaatagtctctttgttcagtggcattactaccaggggcgggttgaagagatcctgaatggctggaactccccggaagcacaattagcagaacaggcgctccgcagcggtcacatagaagcgttaattaacatatgggaaaatgacaactacagtcattatcgtccggaaaagagtgtctggaacctgtatttattggcacagttgccgcgtgagatggctttgaccttctggctgcgtatcaatgagaaaaagcatctgttcgcgggtgaggactattttctcagtatcctcggattggatgcgctaccaggtctgctgttggcttttagtcatcgtccaaaagaaacatttccgttaattttaaattttggcgcaacagaactggcgctgcctgttgcccacgtctggcgacgtttcgcggcgcagcgtgatctggctcgccagtggattttacaatggccggaacatacggctagtgcacttatccctcttgtctttaccaaacccagcgataatagcgaagccgcattacttgccctgcgtttactgtacgaacagggacatggcgaattgctacaaaccgtggcaaaccgctggcagcgtacagatgtatggtctgccctggagcagttgcttaaacagggtccaatggacatttacccggcacgcattccaaaagcccctgatttctggcatccgcaaatgtggtccaggccgcgccttatcactaataatcaaactgttaccaatgacgctctggaaattatcggcgaaatgctgcgctttacccaggggggacgtttttatagcgggctggaacaactgaaaacgttctgccagccacaaacgctggcagcttttgcctgggatctcttcactgcgtggcaacaagctggtgcccccgcaaaagacaactgggcatttctggcgttaagtctctttggtgacgaaagcacggcacgggatctgacgacacagatcctcgcctggccacaagaaggcaaatctgcccgtgctgtcagcggcctgaacatccttaccctgatgaataatgatatggcgctgatacagctgcatcatataagccaacgggctaaatcccgccccttacgtgataacgcggcggaatttcttcaggtggtcgcagaaaatcgcgggctaagccaggaagagctagcggacagattagtcccaaccctgggccttgatgatccgcaggcgttgagttttgattttggtccccggcagtttaccgttcgcttcgatgaaaatctcaacccggttatctttgatcagcaaaacgttcgccagaaaagcgttccccgtttgcgcgccgatgacgatcaactgaaagcgcccgaggcactggcccgactaaaagggctaaaaaaagatgctactcaggtgagcaaaaacctgctcccgcgtcttgaaacggccctacgtaccacccgacgctggagcctggcagattttcattctctgtttgttaatcatccctttacccgtctggttacccagcgattaatatggggggtttatccggcaaatgaaccgcgttgtttactcaaagcctttcgtgtggccgcagagggggagttctgcaatgcgcaagatgagccaattgacctgcctgcggacgctctgattggcattgcccacccgttagaaatgacagcagaaatgcgcagtgaatttgcacagctttttgccgattacgaaattatgccgccttttcgccagttgagccgccgcacggtgctgctcacacctgacgagagtaccagtaacagcctgactcgctgggaaggtaaatccgctaccgttgggcaacttatgggaatgcgatacaaaggctgggagagtggctatgaggacgcatttgtctataacctgggtgagtaccggctggtccttaagtttagtcccggttttaaccactacaatgttgatagcaaagcgctaatgagcttccgttctcttcgagtgtaccgtgacaataaatccgtcacttttgccgaacttgatgtgtttgatttgagtgaggcgttaagcgcacctgacgtcattttccattaaaacacagcgggcagtgatgcaactgcccgttatcaacacgacttaccagcggggaaagcgatgatcgtgcaaaaagagctggttgctatttacgattatgaggtccctgtacctgaagatccgttttccttcagacttgagatccataaatgctctgaattatttacaggttccgtctatcgactggagcgattccggctacgtccaacatttcatcaacgtgatcgagaagatgctgacccgctaataaatgatgcgttgatttatataagagatgagtgtattgatgagcggaaattacgaggtgaaagtcctgaaactgtaatagcaatttttaatcgtgaactacagaatatattcaaccaagaaatagaataatatactctaaataattcaaattggtccgatccggcgcaacgtcccaatggcctggattataaatctcattatcttaattgcaacggggtccagccgtggttataattcgttcgttggaacacgatgttgcacaggctgtggtgttaggcctgaaaatagtaaataaaagaacctgcctcaccagcaggtttttttatttactgtgatctgctttccagatatttttcgctcaaacaactaatgcgccaaacatttattgcgcgtaaaatatcgtttatttcattaatacatttcagggatgaatatatgagtccgcagaataatcatctgcagcgtccgcctgctgctgtgttatacgccgatgaactggcaaaattaaaacaaaatgataacgcaccttgcccgcccggttggcagttaagtttgcctgcggcccgtgcttttatccttggcgacgaagcgcaaaatatcagccgtaaagtggtgattagcccctccgctgtcgaacgtatgttagtcactcttgctaccggccgcggtttgatgttggtgggggaaccgggtaccgcaaaatctcttctttctgaattactggcaaccgctattagcggcgatgccgggttaaccatccagggcggggcatctaccaccgaagatcaaatcaagtatggctggaactacgccctgcttatcaatcatggtccgagtacggaagcgctggtccctgccccgctttatcagggaatgcgcgacggcaaaatcgtccgtttcgaagagataacgcgtacaccgctggaagtgcaggactgtctgttaggtatgctttctgacagggtgatgacggggccggaactcactggtgaagccagtcagctctatgcgcgagaaggctttaatattattgccactgccaatacccgcgatcgcggcgtcaatgaaatgagtgctgcgctaaagcgtcgcttcgattttgaaacggtttttccgattatggatttcgcccaggagttggaactggtcgccagtgctagcgcgcgtttgctggcccatagcggtattccgcataaagtgcctgacgcggtactggaattactggtccgcaccttccgcgatctgcgtgccaacggcgaaaagaaaacgagtatggatacactgacagcgattatgtccaccgctgaagccgtgaacgtggcccatgctgtgggcgtccgcgcctggtttttagcgaatcgcgcgggggagcctgccgacctggtggaatgtattgccggaaccatcgtcaaagataacgaagaagatcgcgcgcgtctgcgccgttacttcgaacagcgtgtcgccacacataaagaagctcactggcaggcttattatcaagcccgccaccgcctgccgtgaggaaagatgcatgagcgagccgttaattgtcggcatccggcatcatagtccggcctgcgcccggctggtgaaaagcttaatcgaaagccagcggccacgatacgtgttgattgaaggcccggctgattttaatgaccgggtagacgaactgtttttagcccaccagcttccggtagctatttacagttattgccagtatcaggacggtgcagcccccgggcgtggtgcctggacgccatttgctgaatttagcccggagtggcaggcgctacaagccgcacgtcgcattcaggcacaaacttacttcatcgatttgccttgctgggcgcagagtgaagaagaggacgatagccctgatacgcaagatgaaagccaggccttactgctgcgtgccacccgcatggataacagcgataccctgtgggatcacttgttcgaagatgaaagccagcaaactgcattaccctctgcgctggcgcactattttgcccaactgcggggcgacgcctccggcgatgcgctcaatcgtcagcgcgaagcctttatggcccgctggattggatgggcgatgcagcaaaataatggcgacgtgttagttgtctgcggtggctggcacgctccggcactggcaaagatgtggcgcgaatgccctcagaaaattaacaagccagaattgcccagcctggcagatgccgttacaggttgttatctcacaccctacagtgaaaagcgccttgatgtgctggcaggataccttagtggaatgcctgccccggtatggcaaaactggtgctggcagtggggcttgcagaaggccggtgaacaactgctaaaaactatccttacccgtttgcgccagcacaaattgcccgcttctaccgcggatatggctgccgctcatctgcatgcgatggcgctggcacagttgcgcggtcatacactaccgttacgcactgactggctggatgccatagcaggcagcctgattaaagaagccctgaacgcgccgttgccgtggagctatcgcggcgttattcatcccgataccgatccgattctgctaacgttgatagacacattagcgggtgacggattcggtaaacttgccccttctacgccacaaccgcctctgccaaaagatgtcacctgcgaactggaacgtaccgcaatctcccttccggcggagcttaccttaaatcgctttacccccgatgggctggcgcaaagtcaggtgttacatcggctggcaatactggagatccctgggattgtacgccagcagggaagtacactgacacttgcaggcaacggtgaagaacgctggaaattaacccgcccgcttagccagcatgcggcattgattgaggccgcctgttttggtgccacactccaggaagccgcacgcaataaattagaagccgatatgctggacgcgggcggaatcggcagtatcaccacatgtcttagccaggcggcgttagcgggtctggcgtccttcagtcaacaattactggagcaactcacactattaatcgcccaggaaaatcaatttgccgaaatgggccaggcgctggaagtgctttatgccttatggcggctggatgaaattagcggtatgcaaggcgcgcagatattacaaacgacgttatgcgcgactatcgatcgcacgctgtggctgtgtgaatctaacggcagaccggatgaaaaggagtttcacgctcacctgcatagctggcaagcgctttgccatattctgcgcgatctacatagcggcgttaatttacccggcgtttctctttctgcggcggtagccttactggagcgacgcagtcaggcaattcatgccccggcgctggatcgcggcgcggctcttggcgcactaatgcgtctggaacatcccaacgccagtgccgaagcggcgctgacgatgctggcgcagttatccccggcacaatctggtgaggcgctgcacggtttgctggcgctggcccgccatcaactggcctgtcagccggcatttatcgccggtttcagcagtcatttaaatcaactgagtgaagccgattttattaacgccctgcccgatttacgcgcggcgatggcctggctaccaccacgagaacgcgggacgctggcgcatcaggtgcttgagcattatcaactggcgcaacttcccgttagcgcgctgcaaatgccgttgcattgtccaccacaggccattgcacatcatcaacaactcgaacagcaggcactggcaagcctgcaaaactggggagttttccatgtctgaactgaacgatcttctgaccacccgtgagctacaacgctggcgattaattcttggcgaagcggcagaaacgacgctttgtgggctggatgacaacgcccggcagatagaccacgcgctggagtggctgtatgggcgcgatcctgaacggctccagcgtggtgaacgttccggtggattaggtggcagtaatctcaccacccctgagtggatcaacagtattcacacgctgtttccgcagcaggtgattgagcggctggaaagcgatgccgtgctgcgctacggcattgaagatgtggtgacgaatctcgacgtgctggaacgtatgcagccttctgaaagcctgctacgcgctgttttgcacaccaaacatctgatgaaccccgaagtactggctgccgcccgccggatagtgtgccaggttgttgaagaaattatggctcgactggcaaaggaagttcgtcaggctttttctggtgtccgcgatcgccgtcgccgtagttttattccactggcgcgaaactttgatttcaaaagtactctgcgcgccaacctgcaacactggcacccgcaacacggcaagttgtatatcgaatccccccgctttaacagccgcattaaacgccaaagcgaacaatggcaactggtcttactggttgatcaaagcggaagcatggtcgatagcgtgatccactctgcggtgatggcggcctgtttgtggcagttacccggcattcgtacccatctggtggcgtttgacacaagcgtcgttgatctcacggcagacgttgccgatccggtagagttattaatgaaagtacagttgggcggcgggaccaatatcgccagtgccgtggagtatggtcggcaacttattgaacaaccagcgaaaagcgtcattatcctcgtgagcgatttttacgaagggggtagtagtagtttactgacgcatcaggtgaaaaagtgtgttcagagcggcatcaaagtgctgggactggcagcgctcgatagcaccgcaacaccttgctatgaccgcgatacggcccaggcgctggttaatgtcggcgcacaaatagccgccatgacgccgggcgagctggcaagttggcttgcggagaatcttcagagttgacataacttgcggagaatcttcagtcatgaatagtctacgtccggaattattagaactgacaccgcaggccctgacggcgttaagcaatgccggttttgttaagcgcagtcttaaggaactggaaaatggcaacgtcccggagatcagccatgagaacgacgctttaatcgccaccttcagtgacggtgtccgtacccagctggcgaacggccaggcactgaaagaggctcagtgcagttgcggggccaacggtatgtgccgtcatcgcgtgatgctggtgttaagttatcaacgactttgtgccaccactcagtctacggaaaaagaagaagagtgggatccggcaatctggctggaagaactggctacccttcccgatgctacccgcaaacgcgcacaggcgctggtcgctaaaggcatcaccattgagttgttctgtgcgccgggtgaaattccctctgcccgcttaccgatgagcgatgtgcgtttttattcccgcagcagtattcgtttcgcccgttgtgattgtattgaaggcacactttgcgaacatgtcgtactggcggtacaggccttcgtcgaggccaaagcgcagcaagcagaatttaaccatttaatctggcagatgcgcagcgaacacgtcacaagttctgacgatccgtttgccagcgaagaaggcaacgcgtgtcgtcaatatgttcagcaattaagccagacattatggcttggcggcatcagccagccgctcatccattacgaggcagcattcaaccgcgcattgcaggcggcagagacctgcaactggcgctgggtgagtgaaagcctacggcaactgcgcgccagcgttgatgccttccacgcccgcgccagccactataatgccggagaatgcttacatcagcttgcggcattaaacagtcgattaaattgcgcacaagagatggcccggcgcgacagtattggtgaagttcctcctgtgccgtggcgcacggtcgttggctctggcattgccggagaagcaaagcttgatcatctgcggctggtgtctttaggtatgcgttgctggcaggatattgagcattatggtttacgcatctggtttaccgatcccgacaccggcagtattttgcaccttagccgcagttggccgcgaagtgaacaggaaaacagtccggcagctacgcgtcggctgtttagttttcaggctggcgcactggcgggcgggcaaattgttagtcaagcagcaaaacgcagtgccgatggcgagctgctgttagctacccgcaaccgcttaagcagcgttgtgccgctgagccctgatgcctggcaaatgttgagcgcgccgttacgccagccgggcattgtggctttgcgggaatatttacgccagcgtccccccgcctgcatacggcctcttaatcaggtcgataacttatttattctgccggtcgctgagtgtattagcctcggttgggacagcagccgccagacgctggatgcgcaggtcattagcggcgaaggggaagataatgtgctgacgttaagtttaccagccagtgccagcgcaccttatgccgttgaacgcatggcggcgcttttgcaacaaacagacgaccccgtgtgtctggtttctggctttgtcagttttgttgaagggcaattgacactggaaccacgggtgatgatgacaaaaacccgtgcctgggcgctggacgcagaaactacgcctgtggcaccgctaccttctgccagcgttttgcctgtgccgtctactgctcatcagttgctgatacgctgccaggcgttacttattcaactgctccataacggctggcgctatcaggaacagagtgctattggtcaggcataattgctggcgaatgacctcaccgcggtgggtttttatcggctggcacatgtgttgggacaatttcgtaatacagaaagcgaggcacgggtagaagcaatgaataacggtgttttgctttgcgaacaattattccccatgcttcagcaacaaggatgaaatagtgctttttactaagagttctactccagttccggactgctcacgccacggtattaggcatatcctatatagcccctggtgagagtcaccagttccttgattaaataaaatggagttttacatgaaggctttcaataagctgttttccctcgttgttgcatctgttctggttttctctcttgctggctgcggtgacaaagaagaaagcaagaaattcagcgccaatctgaacggcactgaaattgccattacctatgtctacaaaggtgacaaggtgcttaagcaatcttctgaaaccaaaattcaatttgcctccattggtgcaaccaccaaagaagatgctgccaagacacttgagccgttaagcgccaaatacaaaaacatcgcgggtgttgaagaaaaattaacctataccgatacctacgcgcaggaaaacgtgactatcgatatggaaaaagtggattttaaagccctgcagggtattagtggaatcaacgtttctgctgaagatgccaaaaaaggtatcactatggcgcaaatggaactggtgatgaaagccgctggttttaaagaagtgaaataatcggttggcggtcatgctctaaacatgaccgccaattttttagccttttttcacatgctggcgcgctgccagtccacgcagaaaataacgtaaaaattgatcgccgcattcgcggaagtttttatgatccggtgcgcgcatcatcgctgtaatttccggcatgctaacgcggaactgctgttcggtgaggatagccagaatgtcatcggttttcaggctaaacgcgatgcgtaattttttcagcacgatgttgttattaatgcgacgttccggctccagtgccggagcagactcatccttgccgcgtttttcataaatcaggccattgaggaaactgctcaaaacaatgtccggacaacgctgaaaaccctcttcgtcttctttacgtagccagacggcgatctgttccgcggtggcttcgacattacccagcgccagaatacgcaccaggtcattattattggctttcaaaatgtagcgcacgctgcgcagaatatcgttacttagcatgaggccttcaggtgttgatgaggcaaaaagccattttagcagtcttttacaggccaatcgcctcttttaagcttttcagataacggcggctgaccggcacggttaagccattacgcaaaatcaactcggcctggccgttatcttccagacgaatctcctgtaaatgcgcgaggttaaccagatactgacgatggcagcgcagtagtggtgtacgactttccagggtacgtaatgtcaattcggtaaagccctctttcccttcgtggctggtaacgtagacaccgctcatccgactgctgacaaatgccacatctttcatttgcagcaaataaatccgactatgccccgtacaagggataaatttcagcgcctgttgattttccggtaacaggctaacatcctgcttgctgcgctcctgacgcaatcgcgccagcgttttctccagtcgcgcttcatcaattggcttcagcagataatcaaaggcatgttcttcaaaggctttaattgcgtattcgtcaaacgcagtgagaaaaacaatatacgggcgatgttccgggtcaagcatccccaccatttccagaccactgatgcgcggcatctggatatcgagaaacagcacatccgggcgcagtttatgcaccgcgccgatcccttccacggcgttactacactctccaacgatttcaatatcgctctgctcctgcaaaaatacacgcaggttctcccgtgctaacggttcatcatcgacaattaagactttaatcatgcctcgtccctccatggtagtcgtaacgttattcgggtgtaactatcaggctcacaggcgacgcttattccatagtcatcgccaaaccgttcacgtaaacgcttatccaccagattcatccccagcccactggcattggttaccggttgatacaaaccggcattgtcttcgatctccagcatcaaatgttgcccctcacgtcgggcgctgattgccactcgccctgtatccagcagttgacttgtcccatgtttaatggcgttttccactatcggttgcagggtaaacgcgggcaattgctgctgggataattcttgcggaatagcaatgttgacctgcaaccggctctggaagcgcgccttttcaatttgcagataagcattcacatgttcaatttcgtcggcgagagtaacaaactcgctaggccgctttaagtttttgcggaaaaaagtggaaagatactgcaccagctggctggcctgttcgctgtcgcggcggatcaccgctttaatggtgttaagcgcattaaacaaaaaatggggattcacctgggcgtgaagcagtttgatctcactctgggtgagcatcgctttttgccgctcatattgcccggcaaggatctgcgcgctaagcaattgcgcaatcccctcacccaacgtgcggttgatgctactgaataaacggtttttggcttcatacaatttgatggtgcccatcacccgctgattttcaccacgcaacggaattaccagcgtgctccccagtttgcattgcggatgcaaagagcaacggtaaggtacttcgttgccatcagcgtagaccacttcaccggtttcaatcgcttttaaagtataagtactagaaatcggtttgccgggtaaatggtggtcgtcaccaattccggtaaaggccagcaatttctctcgatcggtaatcgcgactgcaccaatatccagttcctgatacagcacctgagccactttcatgctgttcacttcgttaaacccctggcgcaaaatgccttccgtgctggctgccactttcagcgcagtggcagaaaaagcgctagtgtatttttcaaacatcgcgcgtttatcgagcaatatacgcataaacagcgccgcgccgacggtattggtgaccatcattggcgcagcaatattactcaccagacgcaccgcatcttcataaggtcgggcgatcgcaaggatgatcagcatttgcaccatttcagcgacgaacgtgacggcaccggcggtaatggggttaaagactttatcagtgcgcccgcggcggatcaggatgctgtgtaccaggccaccgagtaatccttcaacgatggtgctgatcatgcaacttaacgcggtcatgccccccatgctatatcgatgtaagccgccggtcagcccaaccagcccaccgacgaccggaccgccgagtaagccgcccattaccgcgcctatcgcacgggtattggcaatagaatcgtcaatgtgcaacccaaaccaggtgcccatgatgcagaagatggaaaagacgatgtagcagagaaatttatgcggcagacgaaccgtgacctgcattaacggtatgaataatggcgttttactcattaaccatgcaatgactaaaaaaacgcacatctgctgaagcagcagcaacaccagattaaaatcgtacatacccgcaaaccacacttccctttaaaacgcgtaacatacattgcctgcgtttaactttctttgaactcttgcagaaaaatgagaattcgtgagtacgatcactcaaaatcgcctggcaaaaataaaatcaccctatagatgcacaaaaaacgggcaaaactacctggttcgcaaaactgcgtctaaagttaaaccgggacctcgcgagcaagggtgagacgatggcgctttacacaattggtgaagtggcgttgctttgtgatattaatcctgtcacgttacgcgcgtggcagaggcgttacggattgctgaaaccgcaacggacagacggcggtcatcggctgttcaacgatgccgatattgaccggatccgcgagatcaaacgctggatcgacaacggcgtgcaggtcagcaaagttaaaatgctgctcagtaatgaaaatgttgatgtgcagaacggctggcgcgatcagcaagaaacattactgacttacctgcaaagcggcaatctacatagcctgcgaacgtggatcaaagagcgcggtcaggattaccccgcccagacactcaccacacatctgtttattcctctgcgccgacggcttcagtgccaacaaccgactctccaggcgctgctggcgatcctcgacggcgtactgatcaactacatcgccatttgtctggctagcgcacgtaaaaaacagggtaaagatgcgctggtggttggctggaatattcaggataccacccgtctgtggctggagggctggattgccagtcaacaaggatggcgcattgatgtcctcgcccacagcctcaatcaactacgccctgaactattcgaaggccgtacattgctggtgtggtgcggtgaaaatcgaacctccgcccaacagcagcaactcaccagttggcaagaacaaggccatgatattttcccactcggcatttaatgattcgttaacaaatgcgctttactgtacaatcctttcgttaacataaggagtgcattatgcgcatagctaaaattggggtcatcgccctgttcctgtttatggcgttaggcggaattggtggcgtcatgctcgcaggttatacctttattttgcgtgctggctaagcgcctgcaccagcctttcaaacaggcggtctgcgatgatcgccgccagtgccaccagtaacgccccctggatcacatacgcggtattaaatccgctaagcccgatgatgatgggcgtacccagcgtgctggcccctaccgtactggcgatcgtcgccgtaccaatgttgataatcacgctagttcgcacgcccgccagaatcaccggagccgccagcggtagctcgaccttacgcactcgctgaccacgactcattcccatacctttcgcaacttctgtcacgctggcatcaatcgctcccagcccggcaagtgtcgcctgcaggacgggcagcacaccgtaaaggatcaaggcgataatcgctggttgcagaccaaagccgatcaccggaacggcgatcgccagcactgcgacgggcggaaaagtctgtccaacggcggcaatagtttccaccagtgggcgaaattccgcgccccacgggcgagtgacagcaattccggcaccagtgccaatgatcaccgcaaacaaactgctaattcccaccagccagaaatgagccagtgccagagctgcaaaactttcttgctgataaacgggtcgtggcagttgtgggaacaaggcagcaaacagcggctggctgtaaggcagccagaaaatcagcgccacaaacagagcaatgagccagaacagcggatcgcgcaacatcttcatacgcttacgcctccaccagcagatcctgaaaatgcagcgtgccgcaaggctggccctgcatgttcaccaccggcagcacctcgcatccccgcgcaacaaacagagagagcgcatcgcgtagcgtcatctcttctgccagtgcctcaccatctgctcgttcttcgcgacgcacgtaatccgccacactacgtaagctaagcaggcgcacacccagttcactacgtccaaaaaactggcggacaaaatcattcgccggacgagtcagcatcgtcagcggattgccctgctgcactacttcaccgtgatccatcaataccagatgttctgccagccgtagcgcctcatcaatatcatgagtgaccagcacaatggtacgccccagcaaacggtgaatgcgcgtcatctcttgttgcaacgcgccgcgcgttaccgggtccagtgcgccaaaaggttcatccattagtaagacttgcggatcggcagccagtgcacgcgccactcccacacgttgctgctgaccaccggaaagctgatgcggataacgctcacgcaaattactctccagccccagtagcgccattaattcgtcgatacgatcgtcaatccgcgcccggctccatttttgtaattgcggcacggtagcgatgttttgcgccacgctccagtgggggaacaggccaatagattgaatggcatagcccatccggcggcgcaactccagtactggcaggctgcgaatttcttctccggcaaagcggatctctccgctgtcatgctccaccaggcggttaatcattttcagggtggtggatttgccggagccagatgtgccaatcagcacgctaaaactcccttcctgaaaattgagattgagatcgttaacggctttttgtgcgccgaacagtttgctgacatggctaaattcaatcattacgtttcaccttcagcagtgcgataagcaaatcgaacagcgcgtcggtaagcaccgccagaacaattaccgggatcacccccagcaacactaaatcaatggcgctgcttagcagcccctggaaaaccagcgcaccaaaaccgcctgcgccgattaacgccgcaatcaccgccatacctacagtttgcaccatcaccacccgcaggctgcgcagaaataccggtaacgccagcggtaactgaacatgcaggaaacgctgcgccccgctcatccccatcgctctggcgctttccagcacatcgcgcgggatctggttcaaaccgactaccacgccgcgcaccagcggcagcaaggcatagagcaccagcgcaatcagtgcgggtgtcattccggttcctgctatgccgagcgtccccagccacggaaaggccgtaaccagcgcggcaagcggcgcaatcaacaggccaaagagcgccacgctaggcacggtctgaatcacattgagcagagaaaaaattgccccctgccgagcagtggaaaagtagcaccagatgcccaacggcacaccaatcactaacgcaggcagcaccgcaccaaacagcaacgtcagatgttgtgccagcgcgtcgtcaaacacatcctgacggttggcgtattctttcattagactgagatcgttaagcgtgccggagtacagcaaccacagcggaataatggcaatctgcatatgcaacaaccagcgccacagcggatgcgtggagattcggcggatggcatcgctacaggccagcaatgccagcgccgcagccagccagaaaccactgccgaggctggtacgcgccagcgcactgccattttgcgccagttgggtcgccgcctttccagctccccacaccagcaatacgaagacgaattgcgccagaatgagtgcacaaatgctgccttttttaccgggaataaaacaggccgtcagccaggcgcaaccaacgcccaccagcatccagatcgtttgcggccacagctgccagagatgacgcccctcaccgctaactaaacgattaggcgcgtaactgataaacggcagcgccgctgcgattgccgtcagcaacagcagcagcgccagaacaggattaatacggaaataagtcacgggaaattacttcgtccaccctttttgtttcaggtagtcggcagccacttttttggcatccagtccttccacagcaatgctggcattcagttgctgcaatgtttttgcatcgaggctggcgaagactggctgtagccactgtgccatttgcggatactccctcaacacgctctcacgcaccactggtgcaggcgcgtagataggttgcacaccttgcggatcgcttaaggtttgcagccccagcgccgctaccgggccgtcagtgccgtaagccattgcagcattaacgccagaggtttgctgggcagcggctttgatcgtcaccgccgtgtcgccaccagccagactcagcaactgatcctgaccgagcttaaagccataggctttttcaaacgcgggtaacgcatcggcgcgttcgataaactctgcgctggctgccagtttgaaggtgccgccctcttgcagataacgactcaggtcggcaaggctagtgagtttatttttctctgccacatcctgacgcacggcgatagtccaggtgttatttgcaggcgcgggcgtcagccagattaacttgttgtgctcgctatcgagctttttgactttctcgtaaccttgctgcgcgtttttccacgctgcatcgttttcatctttaaagaagaaagcgccattgccggtatattccggatagatatccagttcaccggaagtaatcgccccgcgcaccacaggagtcgttccgagttgcactttattcaccgtcggtacgccgtggctttccagcacctgcaaaatgatattgccgagtagcgcaccttcggtatcgattttactaccgactttaacgggggaagccgcctgtagcggcaggctcacggctgccaacataaccagactacctgcccagagctttaagagtggcatgatgctttcctcattcttttactgttgttttcagcgaattaagagaaaagcatagttgataatggcggggttagcttgagcggaaggattcagttgcagaatcagataaatacttaagaggcatattcggtccggcgtttcctgccggatgcggcgcgagcgccttatccggcctacaaagggcgcaaacgtcgcgcccttactaaagcattacagcaactcaaactcgcctttcttaacgcgtgcggaatcagtgccgataaagacattgaacttgccaggctcggcgtcatatttcatctgttgattccagaacttcagcgcctcaatatcgatcgggaagctgacagtctgagtttcgcccggtttcagggtgattttctcaaagcctttcagctgtttcacagggcgactcatggaagccgtcacatcctgcaagtacatctgcactaccgtggcaccctcgcgcttaccggtgttcgtcacctgcacgctggcagtcactttgccgtcacgcttcatggtcggcgcagaaagtttcacatcagagacggtgaaagtggtgtagctcagcccatagccgaacggatacaacgccccgttagcttcatcaaaataacggctagtgtatttgttcggcttgtcggcattatacgggcgaccggtattcagatggctgtagtacaccgggatctgcccgacagaacgcgggaaggacattggcagcttgccggacgggttgtaatcgccaaacaatacatcggcaattgcattaccgccttcagtccccgcaaaccaggtttccagaatcgcatcagcctgctgatcttctttcaccagcgccagcggacgcccgttcatcagcaccagcaccagcggtttaccggtggctttcagcgccgcaatcaagtcacgttggctttgcggaatagtgatatcggtccggctggaggcttcgtgcgccatcccctgtgcttcaccgactacagccaccaccacatcagattgtttcgccgtctgcaccgcttcatcaatcatctcttgcgggctacgcggatcgactttgaccgcttcttcatactgattcaggaaatcgataatgcctttgtcactggtaacgttcgcccctttggcatacagcactttaccgttttcaccgacggcatttttaatcccggtcagtacggtcacggattgatcggcaacaccggctgcggaccagctgcccatcacgtcacgtttactgtccgccagtggcccaaccaccgcaatggtggcgctttttttcagcggtaacgtttcgagacggtttttcagcaacaccaagctttcgcgcgccacttcacgcgcttctttacggtgcaggcggctttcggcattggtatccaccgggtcagactctttcggccccaaatggctgtatgggtcgttaaacaaccccatatcatatttaacgttcagtacatggcgggcagcatcgtccagctctgccatcgtcactttgccggatttaatcaacccaggcagatacttgctgtagtactcgtcgctcatgctcatgttgattccggatttcagcgccacgcgcaccgcatcttccgggtctgccgccgtgccatgtttaatcagctctttgattgcaccgtgatcggaaacggtgatgcctttaaagccccactggtcgcgcagaacatctttcagcagccaggaatcggaggtggctggcgtgccgttcaggctgttcagcgccaccatcaccgcgccgctgcctgcgtccagccccgctttgtacggcggcatataatcattaaacaggcgctgcggactcatatcgacggtgttgtactctttaccgccttctaccgcgccgtatgcggcaaagtgtttgacgctggtcatcacgctgtagcgatctgccgggcttttaccctgcatcgcttccaccatggttttacccattgtactggtgagatacgtatcttcgccaaaaccttcggaagcacgtccccagcgcggatcgcggctgacatcgaccatcggtgcccaggtcatattcaggccatcatctgccgcttcataagcagagacacgtccgaccgttttcactgcatcgaggttaaaagagctggccagaccgaggctaatcgggaacaccgtgcgctgaccgtgcagcacgtcgtaagcaaagaaaagaggaattttcaggcggcttaattccatcacctgatcctgcatggcgcggatatcctgacgggttacggtgttgaaaatcgccccaacctgaccgtctttgatcatctcgcggatcgcctctttcgggttatccgggccgacgctgattaagcgcagctgaccaattttctcatcaactgtcattttcttaagcagttcggtgacgaacgcatcccgcgcttcgggcgttaatggatggttgccgaataaatcatccgccagtgctggctgcagggccagactcaccgcgattcctacactacatagccatttcatatggatttttcttcctttgttgcccgacgtggcagcgaaaatggtgcaaaaaccgtagtttgccataagcatgatggagagagaaaaagaatgctcagtttattgtctgaattttcaaaatattcactcgctgaattgttatacaaggcgctattctagtttgtgatattttttcgccaccacaaggagtggaaaatgtcttccatgacaacaactgataataaagcctttttgaatgaacttgctcgtctggtgggttctagtcacctgctcaccgatcccgcaaaaacggcccgctatcgcaagggcttccgttctggtcagggcgacgcgctggctgtcgttttccctggcagtctactagaattgtggcgggtgctgaaagcctgcgtcaccgccgacaaaattattctgatgcaggccgccaatacaggcctgaccgaaggaagcacgccaaacggtaacgattatgatcgcgatgtcgttatcatcagcaccctgcgtctcgacaagctgcacgttcttggcaagggcgaacaggtgctggcctatccgggcaccacgctctatagcctggaaaaagccctcaaaccgctgggacgcgaaccgcacagtgtgattggaagtagctgtataggcgcaagcgtcatcggcggtatttgtaacaactccggcggcagcctggtgcaacgtggcccggcgtataccgaaatgagcttattcgcgcgtataaatgaagacggcaaactgacgctggtgaaccatctggggattgatctgggcgaaacgccggagcagatccttagcaagctggatgatgatcgcatcaaagatgacgatgtgcgtcacgatggtcgtcacgcccacgattatgactatgtccaccgcgttcgtgatattgaagccgacacgcccgcacgttataacgccgatcctgatcggttatttgaatcttctggttgcgccgggaagctggcggtctttgcagtacgtcttgataccttcgaagcggaaaaaaatcagcaggtgttttatatcggcaccaaccagccggaagtgctgaccgaaatccgccgtcatattctggctaacttcgaaaatctgccggttgccggggaatatatgcaccgggatatctacgatattgcggaaaaatacggcaaagacaccttcctgatgattgataagttaggcaccgacaagatgccgttcttctttaatctcaagggacgcaccgatgcgatgctggagaaagtgaaattcttccgtccgcattttactgaccgtgcgatgcaaaaattcggtcacctgttccccagccatttaccgccgcgcatgaaaaactggcgcgataaatacgagcatcatctgctgttaaaaatggcgggcgatggcgtgggcgaagccaaaagctggctggtggattatttcaaacaggccgaaggcgatttctttgtctgtacgccggaggaaggcagcaaagcgtttttacaccgtttcgccgctgcgggcgcagcaattcgttatcaggcggtgcattccgatgaagtcgaagacattctggcgttggatatcgctctgcggcgtaacgacaccgagtggtatgagcatttaccgccggagatcgacagccagctggtgcacaagctctattacggccattttatgtgctatgtcttccatcaggattacatagtgaaaaaaggcgtggatgtgcatgcgttaaaagaacagatgctggaactgctacagcagcgcggcgcgcagtaccctgccgagcataacgtcggtcatttgtataaagcaccggagacgttgcagaagttctatcgcgagaacgatccgaccaacagcatgaatccggggatcggtaaaaccagtaaacggaaaaactggcaggaagtggagtaaaaattacggatggcagagtatcgccatccgaattcacttaatcgttctgtgccgtctgccccgccgccgccatttgggcggctttttgttttttatagctcaacgctgctgccggcacaggcatcactttaccggtttcaatccaggtacgcaggcggctggcatcggcaaaatgggtatatttgccaaacgcgtccatcactaccagcgccaccggtttattattgataaccgtacgcatcaccagacaatggcccgccgcattggtaaagccggttttggttaactgaatattccagttatcgcgatacaccagatgattagtattgcggaacggcagcgtatacgtcggattagagaaggttgccatatcttcccgggtagtacttaactgcccgatcaacggatattgtttgctggcaatgagcagtttggttaagtcacgggcagtactaacgttatgcacgctcaatccggtaggttcaacaaagcgcgtgttgttcattccgaggcttttcgctttcgcattcattgccttaataaaggctttgtaaccaccgggataatggtgcgcaaggcttgccgccgcgcggttttcactagacatcagcgccagcaacagcatatctttacggctgatttcgctattcagtcgtacgcggctatagacccctttcatctccggcgtctggctgatatccacttttagtttttcatccagcggcagtcgtgcatccagcacaaccatcgcggtcattaatttgctgatagacgcaatcggacgcaccagatccgggtggttgctatagatcactttgttggtattcagatcaacaatcatcgcgctaccggaggcaatttccggttgactagcggtggtagcggctgccgttttcgcaacggcctgcggtgcaaaaggcacagccagcatcagggccaggctaaataaagaaactcgaaatttcggcatgatgagcattcagatagtggttcacgcgcacgggttgcgcaccgccggagtaaggatttactgaggctagcgacgccatcataacgagcaaaaagtgcgatcgtcaaaggagaatcgtgaggaaatgctgcattgctgacatttacgccagcaatgcaacgtcaaagaactttttagaacaaacgataaccgtagccccatagtataacggttagggcgagcagcacttccagtaccagcacgccaatcgccagcgtgctactagagaagctaaggccttcctctttgttgatattcaggaagctcggaataccaaggtaaagcaggtagccggtgtaaaacagcgccaccgtgccgaccagcgcacacaaccagaccagtggataaagcgccaccagaccgcttaaaaacagcggagttgcaacgtagcccgcgaagaccatgcagtgcgcaagactcggacgctgcggataattacgcgccatccaccagatgacccgccccatcaccgcgaccccagccagcataacgccgtaaaacaagacagccagcgccagtccggtaaaccaggataacttcaggatagtgccatcgccaaaattccagccaatctgtgtagtgccaatgaaggcgcaaatcaccggaatcgccgccatcagcaaaacgtggtgggtgtaatggtgagaaatcgtttcgttttcgcgattaatcacctgcatttcacgatcgggatgggaaaacagtccccagacatggctcataccgcccccttgttgtgagttcatgaacctgacagttcaagtataagtcagcttgtgattattttttgttcgcccatgtaattttcactgtctgatgaacgtcctttttcagcgtgaatgattcacagggtgtatgcttactggcaaccaaagggagacagactggcctatggatctcaatacacttatcagtcaatatggttatgccgcgctggtgatcggtagcctggcggaaggtgaaaccgtgactttgctgggaggcgttgcggcgcatcaggggctattaaagttcccgctggtggtactttctgtggcgcttggcggcatgattggcgaccaggtgctctatctgtgcgggcggcggtttggcggcaagctgttacgccgtttcagcaaacatcaggataaaattgagcgggcgcagaaacttatccaacgccatccgtatctgtttgtcattggtacgcgctttatgtatggctttcgggtgattggcccgacgctgattggtgccagccagctgccgccgaaaatctttctgccgctgaatattctcggcgcatttgcctgggcgttgatttttaccactattggttacgctggtggtcaggtgattgcgccgtggttgcacaatctcgaccagcatttgaagcactgggtctggttgattctggtcgtggttctggtggtgggcgtgcgctggtggctgaaacgacgcgggaagaaaaagccggatcatcaggcgtaaaaccattgccctggataaggcgttcgcgccgcatccgacatccggagtaccatgcctgatacgacgcttgtgcgtcttttcatgccgaccaaaatattacccaatgaaatatccacgcacctcactgcgttattctgggttgaactgtggattcgccaacataaagccgccatccactatcaagctctgcccggtggtgtaatttgcgccctcgctacaaagccacaccaccaggctggcaatctcatgcgttgcgccaaaacgccgcaagggaatgctaggctccgcgtcgggcttcacgtcgctgtcatccatgccattcattggcgtggcgatcgccccaggcgcgactgcgttcaccaaaatcttatgcctgaccagctccagcgccatcgctttggttaacccaccgagcgcatgtttagcggctgtgtaggcgctggcatccggcagcggcgtatgttcatgtacgctcgtaatgttgatgatgcgaccgccctgcccttgtttcaccatctgacgagccgcaatttggctgcataagaatgcaccatcgacatcaacggtaaaaatcttgcgccactcatcaaaagccatatcaagaaacggcgctttggtcattgcacccgcattattcaccagcacatcaatgcgccccagccgttgaatgagtttctccagcgccagtgccccttctggtagattgccgagatccagctgcacgatctccgcacgtacgccgtggctaactacctcacgcgcggtatcttttgccccttcttcatcactgtgccaggtaataccaatatcaaacccctgctgcgccagtaataacgcgcactctttgccgatcccgctatcggaggcggtaataatcgcaacctgtgccatcgagttctccacttaacgctgaataaacgttaagtatagaaggcgcatatcatcagcgtttgtaccccccgcccaacgcaccagtgagttgaatggaggcatccagccactgcccttgcaataacaggccattggcccgctcacgcagcgcggggattctggcttcgctgacgcgggaaccagcaatgatgcccgcgttaaagcgcgcctgcgcaagacctaccacacgcaaggcatcgcgctcaatttgcgcctgatgctggtttttctccgccagtgtctgaacctgactggctgcccgcgccacgtcattcaccgcttcaaccaccgctttgttgtagctggcgatagacaagttgctttcggcttttgcgatatcgagattggcgttaagacgaccactatcgaaaatgggtagcgtcaggcctgccgtaacgcccatttgctgcgcggaatgacggaacagatcgcttaagtgcaacgcatcctgttgcaggaaggccatcaggttgatgtcaggataaaatgccgcttttgccgcatcaatggtgcttaggctactctcaacgtaccagtgcgccgcctgcaaatctgcccgccgggccagtaaggagtaccccagttcatcaggaagctggcttgccactttcggcaacgcgaccggtttaagcttcaaactctttgtctggttatttgtaagtgcgcttaaccgtgcctcaataattttcattttccccgcgacatcgttgagctgctgccgggttttgctggcattaatatcggtttccacaccttcaacactagaagtaatcccgttctgatatagctggcgatcggtcgcgataatggtgttctgctctttttctatttgctgcaagaccgtgtttaacgccgcctgggtttgccactcccagtacaggcgggctacgctgccagccagcaattggcgggtttgctcgcgttccgccgcccgtgctttaaccgtacccaggcgggcagtaacctccgcccgattctttccccagatatcgagatgccagcccgccgttaagccaaaagtaccgttggtgtaccacgggccggtcgtacctgcggccggatcgttcagagcaaacggccccattaagccttctgcgctcattttttgccgctccatatccgccgaaaagtcgatctgcggaccatcctgagtggcaactgccttcgcctgggcttcagctagctgaatgcgctgttcagccacctgcatatccggtgcgttctgtagtgcattgttaattaaggaagactgttgattatcgtgatactccagccaccattggctgtctggccaaccattttcagcgccgtgggtaatgcggtgtcaacttgtgcagcgggcgtttgctggcttaacgcctggcgggtttcatgcataggcgcacacccggccagcatcagtaacagcggaaaacaggcgatggctggataaaaggaatcacgattcatgggggaataatcaggtaagaaaaggtgcgcggagattaccgtgtgttgcgatatattttttagtttcgcgtggcaatacatcagtggcaataaaacgacatatccagaaaaatatacactaagtgaatgatatcttccgatttatcttaatcgtttatggataacggcaaagggcttcgttttttcctatacttattcagcactcacaaataaaggaacgccaatgaaaattatactctgggctgtattgattattttcctgattgggctactggtggtgactggcgtatttaagatgatattttaaaattaattaatgtcatcaggtccgaaaataacgagaatatttcagtctctcatcctgttgcgctcctgtcatgtgcattgcttcatataatcactggcgcaaggagcgcgcagggggcggccaatcgccgccgccccctgcacccccgggctctggcgaacaaaatcgccgctgcgcggtgccctcggcttatcccttacggctaccgggtcgggcgcgaggtaacatccctgtaaaacgcgccctcagcccacatccatgtgggctgccccggccttcagggaacgcctcggcaattttgacgccaccaaacaaccgtgcggcctattgataaagagctaacacattgtcaaaaaacatcactatggttttttagagtttctcgatatcaattgcctgaatagcccttgcaatatcaggggaattattcaacacccgaacatgctgaaataattccgttgcttcatcgtattctttacgcaaataactcaaccactgtttaatccgcgcaacgtgatataacccggtatcgccctgcttttccagacgggtatatttttgcagcaaagcaaccacctccggccacggcattcgcggttcgttatattttaccacccggctcaggttgggaatattgagcgccccgcgaccaatcatcactgcgtcgcagccgctgatcgccatgcattgttgcgcgctctgccagtcccagatttcaccgttggcaatcaccggaatattcagccgctggcgaatatcgccaatcgcctgccagtcaatatgctccgcgcggtaaccctgctctttcgtccgcccatgcaccaccagctccgtagcgccagcctgttgaaccgcatcggcgatttcaaatttcttctcaccgctgtcccagcccagacgcactttcacgctgacgggcaaatgcgccggtacagcttcacgcatcgcttttgcaccctggtagatgagttcaggatctttgagtaacgtcgccccgccgccgctaccgttaaccgttttgctcgggcagccgcaattgagatccacgccccaggaacctaactccaccgcacgggcggcgttctctgccagccattgtgggaactgacctaacaactgcacgcgcaccagcgtaccagatggtgtccggctggcgttttgtagctcagggcaaatgcgatgaaagacttttaccggcagcagttgatccaccacgcggacaaactcggtgatgcacagatcgtagtcgttaacttcggtcagcaattcacgcaccagagagtcaagcactccctccatcggtgccagtaacacacgcatatcatcacccgcaaaaaaatgaggcgctatgttagcgcctatggtcagcggattaaaggtctgcaaagagggattgctgcaaactgcaatccctctctatgcttgatgtatgcctgagttcgctgcgcattgcgtaatgccggggagcgaaaaaataagcgctgatttcttaatgtgatcggtagcacgttttacgaattaattgtatgatgaatccatctcatctggggtgttgattatgagtaagacactgaacattatctggcaatatttacgcgctttcgtcctgatttatgcctgcctgtatgcaggcattttcattgcttccctgctaccggtaaccattccgggcagcatcatcgggatgctgatcctgtttgtcctgctggccttgcaaattcttccggcaaaatgggtcaatccggggtgctacgtactgattcgctatatggcgctattgtttgtgccgattagcgtaggcgtcatgcaatattttgatttgctccgcgcacagtttggcccggtagtggtttcctgtgcagtcagtacgctggtggtttttctggtggtgagctggagtagccaactggtacacggtgaacgtaaagtcgtaggtcagaaaggaagtgaagaatgatggcgaatatctggtggagtttaccgctgacattgattgtcttttttgccgcccgcaaactggcggcacggtataagtttcccttgcttaacccgttgctggtagcaatggtggtgatcattccttttttaatgctgactggcatctcttacgacagctactttaaaggtagcgaagtgctaaacgatctgctgcaaccggcggtcgtcgcgctggcctatcctttatatgagcagctacaccagatccgcgcgcgctggaaaagcatcatcaccatctgttttatcggcagcgtggttgcgatggtgacggggacttccgtggcattgttgatgggcgctagtccggaaatcgccgcgagtatcctgccgaaaagtgtcaccacgcctattgcaatggcggttggcggcagtattggcggtattccggcaatcagcgcagtttgcgtgattttcgtcggcatcctcggcgcggtatttggccatacattgcttaatgcgatgcgtattcgtaccaaagctgcgcgcggtctggcaatggggactgccagccacgccctcggtacggcgcgctgcgccgagctggattatcaggaaggtgcatttagtagcctagcgctggtgttatgcgggataattactagcctgatcgcaccgttccttttcccgattattctggcagtaatgggctaaaatttgcgatgcgtcgcgcatttttgatgtatgtttcacgcgttgcataattaatgagattcagatcacatataaagccacaacgggttcgtaaactgttatcccattacatgattatgaggcaacgccatgcatccacgttttcaaaccgcttttgcccaacttgcggataacttgcaatctgcactggaacctattctggcagacaagtacttccccgctttgttgaccggggagcaagtcagtagcctgaagagcgcaacggggctggacgaagacgcgctggcattcgcactacttccgctggcggcggcctgtgcgcgtacgccattgagcaattttaatgttggcgcaattgcgcgcggtgtgagcggaacctggtatttcggtgccaatatggaatttattggtgcgacaatgcagcaaaccgttcatgccgaacaaagcgcgatcagccacgcctggttgagtggtgaaaaagcgcttgcagccatcaccgttaactacacgccttgtggtcactgccgtcagtttatgaatgaactgaacagcggtctggatctgcgtattcatctgccgggccgcgaggcacacgcgctgcgtgactatctgccagatgcctttgggccgaaagatctggagattaaaacgctgctgatggacgaacaggatcacggctatgcgctgacgggtgatgcgctttctcaggcagcgattgcggcggcaaaccgtagccacatgccttacagtaagagcccaagcggtgtcgcgctggaatgtaaagacggtcgtattttcagtggcagctacgctgaaaacgccgcattcaacccgactctgccaccgttgcagggagcgttaattctgttgaatctcaagggttatgattacccggatatccagcgcgcggttctggcagaaaaagccgatgcgccgttgattcagtgggatgccacctccgcaacgctgaaagctctcggctgtcacagtatcgaccgagtgcttctcgcttaagcctggtgccggatgcggcgtgaacgccttgtccggcttgccagccctctcctggtgtcgaaattcccggcaaacagtttgccgtttcttgcgcaaaaccagcgggtaaagtagcctgatggaaattttccttagatcgagtctcctgcatgttaaagcgcgtgttcctcagcctgttagtcctgatcggcttgctgctgttgactgtgctcggcctcgatcgctggatgagctggaaaaccgcgccttatatctacgacgaattgcaggatctcccctaccgccaggtcggtgtggtgctcggaacagcaaaatattatcgtactggcgtaattaatcagtattatcgctaccgcattcaaggagcgattaatgcctataacagcggtaaggtaaattatctattactgagcggcgataacgcattgcaaagttataatgagccgatgaccatgcgcaaagatttaatcgctgctggtgtcgacccaagtgatattgttctcgattacgcaggctttcgtacgctggattccatcgtgcgtacacgcaaagttttcgatactaatgatttcattattatcacccaacgtttccactgtgagcgagcattatttattgcgctgcatatggggattcaggctcagtgttatgccgtaccgagtccgaaagatatgctgagtgtacgtattcgtgaatttgccgcccgtttcggtgcgctggctgacctttatatttttaaacgtgaaccgcgttttttagggccgctggtccctattccggctatgcaccaggtaccggaagatgcgcaggggtatcccgccgtcacacccgaacagttacttgaattacaaaagaaacaaggaaagtaattatggatgtacagcagttttttgtcgttgccgtttttttccttatcccgatattttgtttccgcgaagcatggaaaggctggcgcgcaggcgcgattgataaacgggttaaaaatgcaccggaaccggtgtatgtctggcgagcaaaaaatcccggactctttttcgcttatatggtggcatatatcggcttcggaattttatctatcggcatgattgtttatcttattttctatcgttaatattcccctctccagttaattattgagaataattattacttcacctgataagctgcggatatcacattcctaaccgcagctatttgtgaatcttttcacagtttaaattcccccgcacgcttagccttaatatcagtacattattatttactaaacgctcgccttaattacctatagcattaaggaagatcacatgccgcaacaaaattatctggatgaactcactccggcttttacgtctttactggcgattaaagaagcctctcgctgtttattatgtcacgacgctccctgtagtcaggcttgcccggcacagaccgatccggggaaatttattcgcagtatctactttcgtaattttaaaggcgctgccgagacaattcgcgaaaataatgccctcggtgccgtttgtgccagagtgtgcccgacggagaaattatgccaaagcggttgtacccgtgccggtgttgatgctcccattgatatcggccgcttacagcgttttgttactgattttgaacaacaaaccggaatggaaatttatcagcccggtactaaaacgctcggcaaagtcgcgattattggcgcaggtcctgccggattgcaggccagtgtgacactgacaaaccagggttatgacgtcacgatttatgagaaagaagcgcaccccggtggctggttgcgtaacggtattccgcaattccggttaccgcaaagtgtgctggatgcagagatcgcccgtattgaaaaaatgggcgtgaccattaagtgcaacaacgaagtcggtaacacactcacccttgagcagctgaaagcagaaaaccgcgcggtactggtcaccgtggggttaagtagcggttccgggctaccgctgtttgagcatagtgacgttgagattgccgtcgacttcttgcaacgtgcacgacaggcgcaaggcgatatcagcattccacaaagcgcattaattatcggcggcggtgatgtcgcgatggacgtagccagcacgctgaaagttctcggctgtcaggcggtaacttgcgtagcgcgtgaagagttagatgagtttccggcaagcgaaaaagagtttaccagcgcccgggagctgggcgttagcatcatcgatggattcacgccagtagccgtggaaggcaataaagtcacgtttaagcatgtacggttaagcggcgaactgacgatggcggcagataaaattattctcgccgtcggtcagcatgccagactagatgcctttgcggagttagagccgcagcgtaacaccatcaaaacacaaaattaccagacccgcgacccgcaagtctttgctgctggcgatattgttgagggtgacaaaaccgtggtctatgccgtgaaaaccgggaaagaagccgccgaggcgattcatcactatttagagggagcttgcagttgttaaattaatatttagagggagcttgctcatgttaacgaaagatcttagcattactttttgcggcgtgaagtttcccaacccgttctgcctctcttctagcccggtaggcaactgctatgagatgtgtgccaaagcctacgacacaggttggggcggtgtggtgtttaaaacgatcggcttttttatcgccaacgaagtcagcccgcgttttgatcatctggtgaaagaagataccggttttatcggcttcaaaaatatggagcagattgctgaacatccgttggaagagaatctggccgccctgcgtcggctgaaggaagattacccggacaaagtattgatcgctagcatcatgggggaaaatgagcagcaatgggaggagctggcgcgcctggtgcaagaagctggcgcggatatgatcgagtgtaacttctcctgtccgcaaatgacttctcatgcgatgggtagcgatgtcgggcaaagcccggagctggtagaaaaatattgtcgggcagtgaaacggggttccacgctgccaatgctggcgaagatgacgccgaatatcggtgatatgtgcgaagtggcgctggcggcgaagcgcggcggcgcagatggcattgcggcgattaacaccgttaaatccatcaccaatatcgatcttaatcagaaaatcggtatgccgatcgttaacggaaaaagcagtatttccggatattccggtaaagcggtaaaaccgatcgccctgcgcttcattcagcaaatgcgcacccatccagaactgcgcgatttcccaatcagcggtatcggcggcattgaaacctgggaggatgcggctgagtttttattgctcggcgcagcaacgttacaggtgaccaccggcatcatgcagtacgggtatcggatagtggaagatatggcaagcgggttgagccattatctcgccgatcagggatttgatagcctgcaggagatggtaggtctggcgaataacaatattgtcccggcggaagatttagaccgcagttatattgtctatccccgtatcaatcttgataaatgtgttggctgtggacgctgttatatttcctgttacgacggcggtcaccaggcgatggaatggagcgagaaaacccgcacaccgcattgtaataccgagaaatgtgtgggttgtctgctttgtggtcacgtctgcccggtgggttgtattgagctcggggaagtgaagtttaagaaaggcgagaaagaacacccggtaacgttgtaaaaccagagacgcatccggcatttggttcctgtcgccggatgcggcttgaacgccttatccggcctacaaaaccatacaaatcagtatgttgagcttattgtaggccggataaaacgcgccagcgttgcatccggcatttggctcctgttgccggatgcggcgtgaacgccttatccggcctacaaaaccacacagatcatgatgttatgtgcgtttatgaccgaatgcggaccacattcacatcatttcttacgcgcgtatttcagactatccagcgctacggcgaagataataatcgcccctttgatgatgtactgccagtatgggtttacgccgatatacgtcaggccatagttgatgacggtaaaaataattaccccggtcaccacgccaatcaccgtccccacaccgccgctgaagcttacaccgcctaccacgcacgccgcgatagcatccagctcatacataaagccgaggttgttggtggcagagccgatacgtccggcttctaacatcccgccaaaggcatagaacacgccagacaacgcgtagatcatcagcaggttcaggccgacgttgacaccagatacttttgccgcttccgggttaccgccaatggcaaaaatgttcttaccgaagcgggttttgttccacaacacccagacgaacgccaccgcaatcaacgcgtagaaggtgatgtaagagagacggaaactccccagcgcgacaaagccctgagcaaaggtagagaagccactgtcaaaaccagaaattgggctcgccccgacaaagtcgtaatagaggctgttgatgccatagacgatgatcatcgtgccgagcgtggtaatgaacggcgtcacgttgagataagcgataatcagaccgttgatcaaaccgatcaccgcaccaatggcacagacaatcagaataaccagcgcaatcggcatcgtcgccatttccgggaacactttgttggcgttatccatggactgcaataatgtcgcagccaccactgccgccagccctacctgacgaccagcagaaagatcggtcccctgggtgacaattaaccctgccacaccgagcgcgataataatacgcacgctactctgggtgagaatattacttaagttcaacagacttaaaaatgttgggtcctggaaaataataatcgccagcaaaactaaaagaacgacgtaaataccgccctctttcaggtaagtaagaaaacttttcttatttaacgcactcatgggaagcccctaatcttaaaggtgcaaagacgcaagacgcagaatttcgttttgcgttgttgtttttgtatcgacaattccggaaacgagaccattgctcatgaccagaatacggtctgttatccctaacaactcaggcatttcagaggagataataataatccccttgcctttcttcgccagttcggcaattaactgataaatttcaaacttcgccccgacatcaataccgcgcgtcggttcatcgagcattaatatttctggttgcgttagtagccagcgaccaataatcaccttttgctgattaccaccggagaggctaccaatttgcgtccgatgacccggcgtttttacccgcatgctatcaatcacccactgggtatcgcttttcatccggctgttatccagtaaaccaactttatttttgtagttgcgaatattggaaattaagctgttaaaaccaatatccagataggcataaattcccgtactgcggcgctcctcagttaccagtgcaaatccatggtttatggcttcgttggcattatggttattgatctgtttgccgtgcaacgttatggtgccagcgcttttctcgcgaataccaaataacgtctcaacaatatcggtacgtttcgcccccaccagaccggcaataccgaggatctcccctttatgcagatcaaagctgacatcgcgaatgctcggctggcgcagactcgtcaggttacgtacctcgaggatgacttcgcccggtttgttttctttgtcagggaaacgctggttaagagaacgcccaaccatcatggcgatgatcttgtccatcgtcagtcctgccagcggttcggtggcgatccactgaccgtcgcgcaatacggtaacttcatcacataactggaagatttcttccattttatggctgatataaacaataccgcagccgcgctcttttaatttacgaataatagtgaacagatgattgacctctttttcggttaagctagaagtcggttcatccataatcacaattttcgcgttataggaaaacgctttggcgatttcgatcatctgcatttggctaacggataatgtgccgacgcgcgcacgcggatcgatatcaatatccagttcgtcaaaaatcgctttggtttcgcggtacattttgtcctgatcgacaaacatgcctttggtgggatatcgccccagccacatgttatccatcacgctacgttgtaataccaggtttaactcctggtgtaccatgctaataccattttccagggcttcttttgcagaatggaaatcgatctctttaccctggaataaaatggtgccggagtctttttgataaataccaaacaggcattttaataatgtgctttttcctgcaccgttttcccccattaatgcatggatagaatgtggccggacttttaaattaacgttatcaagtgccttaacaccaggaaaggacttgttgataccgctcatttccaacaagtattccccggaggacggagtcgtactgctgaccatataattttaccttgttggccatacaataagggcgcagtaatagactgcgcccaatcagtcttatttcttgctgaattcagccaggttgtctttatctacgccaacataaggtacgcggaccactttgttgtcgattttccagttggtgccatcagccgcacctttaccatcggccaggtttttcgccagatcaaaggtcgctttcgcctggttgttagcatcgttcagtacggtgcccgccagtgcaccggatttcaccagcgccagcgcttctggcagcgcatcgacgccaaacaccggaatgctggacttgttgtgtgctttcagcgcttcaaccgcgcccattgccatcgcatcgttgttggcgataaccacttcgattttgttggcgttcgggccagacagccaggcgtccatcttatctttcgcctgagcggtgtcccacattgcggtatctaactgtaactgttcagttttgatgcctttatcgttcaattctttaatcacgtaagtggtacgtgcttctgcatccggatggcccggttcacctttcagcagtacgaactgaatctgaccgtctttgttcagatcccaaccctgattcgccgcccagtgtttagcaatcaaatcgccttgaataatgccggactctttggagtcagtgccaacgtagtaggctttgtcgtagctatccagcgccttacgagacggttctttgttgaagaaaaccaccggcacgttttgcccacgcgctttctcaatcaccgtacccgcagctgccgggtcaaccaggttgattgccagtgccttcacccctttcgccagcaatacgtcgatctgatcgttctgcttggactggtcattctgagaatcattcatcagcagctgaacatctggcgcggctttcgcatcttgctcaatagccttgcgcactacagacataaagttatcgtcgtacttatagattgttacaccaatgcgagtatcagcagcgtgtgcagcggcaccgaataacatgctggccatcacagcagacagggttaacaccttcttattcatggtatctccggtttttcttatgcagggtagtgcttgagataaatgctcggcggggcagtagagttaatgaagtgttactgaacgccgaagctcactttttaaaattcgttcttccatgcccggtaacgctccagaaaacggctttaattgttgttatgacgctgttacctcggcaaaagtgattattcactgttacatacgggttacaacgttaaaacggtgcaatcatagctatcacattgttaagatactgtgaaatcactcacagattgaaagcggttacatcgcctgatttgtactgttagtgatcgccgccgcattctggcgtgttgcgacagaatggcgacgcactaacgtcggcataaaacagtggctggcacgaggatcaatattgcctgctgccccctgcaaggccagttcggtggctaatttcgccatactagcaatgggataacgcacggtcgttaattgcgggtcggtgtaacgggcgatgggaatatcatcgaaaccgatgatactgagatgtaacggaatcgcaatgccattatcttttaatgctgtcagtgcgccagcggccatattgtcgttataagcaaatacagcggtaagttgtagattgcgccccagcagttcaaccatcgccgcctcaccgcccggcatgtccggcgtaccagcgccaatccagctttccggcggaataatatcctgctctttcaacgcactcatccagcctgctttacgcatggcgtcatcttcaatgccgtggctggaagaaagataaccaatacgttgatgaccgttattcagcaacatgcgcgtcgccattcgggcaccgctgagattatccaggcaaacgcaacgatgggcgtaccccggcacaacgcggttgattaacaccataccgggaatgttatccataaattgcgccagttcatcgtcactcaatgctttactgtgaacaatcaacgcattacaacgctggcgaattaacacctcaatggcgtgacgctctttttccgcttcatgatagctattgccgattagcacgtatttctgatgctgctgagcgaccagatccaccgcttttaccagcgcgccgaaaaacgcatcagaaacgtccatcaccaccacgccaatggtgtcgctaacctgagttgccagcgcctgggcattggcgtttggccgataatccagctcactcacggctttcattactgcttcacgcgtgtcggcactgaccagcgtgctgttattgagcacccgggaaaccgttgccacagagacgccagcctgacgcgctacatcacgaatggtgatcatattcactacctgttatgagattgcagtaaatgactgcttgctggcggctattttgtcagcactgaatacaggacttcgtgaatcgagtcacagcaatggaaacggttacagccgttttgttaacgaatgtgatccagatcgttatctacttgttttagatattgccggtccggcagcacgcaaagttaactgacgccagagccattccaccggcccctggcggaagtaacgcagccagataacagagaagaggatattcgccagccataccggaataacaaacgccagcagctccaggcggtcaaaatgcataaacaaaccgaggtggtaaaaaagcgtggtacaaatcagcgtttgcaatagatagttggtcagcgccatccgtccgacgcaggcgatcgcaagcaccagcttaaagcggctcaattgcggccagaagccataaaacaggctcgcatagccaatcgcctgaaacggcgcactcagttcccgcggcatttgaagtaagaaggcacaccagcgatacgcccagtccagctgccattgcagggcgatggcaggaaggttaatggtcaccccaatcgccaccagcacaaaaccagtacgacgatagtgacgtaagctgaactgccctttcagccagccgctgcgcatcagcgccgcaccaatgagcatcatccctgccagttgccagccatactgtgcgcccagtgccagtaaactgttgccaacaccatcggcacgattactgatcgcttcaacgccgccgtgaagcttccagtatttttcatacaaaatagcgcttgcatccggcgtccaggcgcggctggtctggctgtcggaaatcagccccaataacagcaaaacgccaagccccaccagataaagcatgacgcctgtattaaacaggctttttacgcttggcgcatcgcgcaccagccgccagcagattaagcccaccagcccgtaagccagcaaaatatcgccgtcccagaacaataaaccgtgaataaagcccaacaagactaacagcgttaaccggctctggatccagcgtctgccacggggcagcaacatttgcaggcccgcaccaaacagtagcgcaaaaagcgtgaggaatttcacctggccgatgagatcaagaaatgcccaagtccatgcatcccgcggcgtaatagcaccgtaccaggcgggattgagataagccgcctttggtagcccaaaggcgctgatgtttaatagcaggatccccagaatggcgacgccgcgaacaaaatcgagcgtgacgttgcgctccatggttcctgccttttaatcagttgtgatgacgcacagcgcgcagaaactcgtggcgcgtattctgactggatttgaacaatccaccaagagaggtcgttgtcgtggcactggttgcatcgcggatgccacgcgccttcacgcagtaatgcaccgcgtcgatgctgacagccacgttattggtgcccagcagcgtttgtagcgcaataagaatttgctgcgtcagacgttcctgcacctgcggacgctgggcaaagaactgcacaatgcggttaattttactcagaccgatcacgctatctttcgggatataggccaccgtcgctttgccatcgatggtaacaaaatggtgttcacaggtgctggtcagagtgatatcgcgcacggtgaccatttcatcgaccttcattttgttttcaatgagggtgattttcgggaaattggcgtaatccagaccggagaaaatttcatcgacatacattttagcgatgcgatgcggcgtttccatcaaactgtcatcagccaggtcgagattcagcagctgcatgatttcggtcatatgaccagcaataaggcttttgcgcgtttcgttatccatttcatgcacgggcgggcgcagcggtgtttccagtcctcgcgcaactaacgcttcatgaaccagggccgcttctttactgagacttggcatttatgatttctcctgcaggtgtgacgcctccgccctgcgtgggggcaaagttattaagctgatttacagcctgattattgtgcgtgaggcggcgcacataatccagtattcacagcgataattattgtaattgccgctgcctttcatcagcagatgttaaaacatcgttatgcaaatacggaagtgaaagttactcacagcacattgaataaacggtatgatgaagaaattgcaaacaacacaacaaggagccacgcatggaaatgctcgaagagcaccgctgttttgaaggctggcagcaacgctggcgacacgactccagtaccttaaactgcccgatgacgttcagtatctttctccctccacctcgtgatcacactccgccaccagtgctgtactggctttccggattaacctgcaatgacgagaacttcaccaccaaggcgggtgcccagcgggtagcggcggaactggggattgtactggtgatgccagacaccagcccgcgcggcgaaaaggttgccaacgacgatggctacgatttaggccagggcgcaggcttttatcttaatgccacgcaaccgccgtgggcgacgcattaccggatgtatgattatctgcgcgatgaattaccggcgctggttcagagccaatttaatgtcagcgaccgctgcgccattagcggtcacagtatgggtggtcacggtgcgctgattatggcgctgaaaaatccgggtaaatacaccagcgttagcgcctttgcgccaattgtgaatccgtgcagcgtcccgtggggaatcaaagcgtttagcagctatttaggtgaggacaaaaatgcatggctggaatgggacagttgcgcactgatgtatgccagtaacgcgcaggatgcgatcccgacgcttatcgatcagggcgataatgatcagtttcttgccgaccagttgcaacctgcggtactggcagaagccgcgcgccagaaagcgtggccgatgacgctgcgtattcagccgggatatgatcacagttactacttcatcgcctcttttatagaggatcacctgcgcttccatgcgcagtatttactgaagtgaaagtccgcccggttcgccgggcatcttctcatcagaagcgataatccactgccataaagtaacgacgtccgtcttcgttatagctgtagtcgtcacgactgagatccttgtcgccaaggttcagcacgcctgcgcgcagtttgacgtctttagtcacctgccaggccgcgccggtattccagatggtataaccgcccggtgttttagccgtcgcgctgtcggcgcgtttctgcccggtatagtgcccagaaacatagaaactccagtcttccagcgccagcggtttccagtccagcgtaccgttagcagtatggaacggcagatcggatagcggtttgttttcgccgttgctgacatcacgaccatcgttgtaggtgtagttgatgctcagtttccattcatcgttgaacggaattttcagttcggtttccacgccctgaatacgagctttgttaacgttgtagtagctaaataccggtatgcgccgtccgttagcgcccgtctcaaaaccaacaaagttttggtagcccggtgcagcgttgacgtcagacgtacggctgatgctgatacgatctttcacatcgttacggaaaacggtaacgctggattcaaccccttccagccagccttcttcacccatgtagtaaagccccagctcccaactttcgctggtttctggtttcagatccgggctacccacaatcttacatgcgccacggcaggaattgctcgtccagtcagggctaagttgcaacagagaaggtgctttaaatgccgtcgcccagccccctttcaccgttacggtgtcggtggcgttataaaccaggtaggcacgcggactccagtgttcaccgtaggtttcgtgatcgtccatacgcacgccggtcgtcagcgccagcggctcgaagatccgccattcatcttccacaaacagcgcgtactggctggcagacgttttggagctggttcccccggtcaggttcaccgcatcgctaagtttgtcgtgacgccattcaccgccaaccgtgagaaactgattaatcgccgtcagcggcaacgtgtatttgccgtcgaccgtattgctttcggaagttatcgggctgctgttgccagggtttttgttctcgactttctcaccgtagtatttcagttcgctggtgccgtaatcccaacgcccattatggctgacggagtagttctggcgttccaggcggtttttgtccaggctgtcggaatcacgatcctgacggtcgaaaccgtatccggcagtaaaatcgtgattttgattcggtgtccaggcaaattcgacattgccgtcgcggctggagaatccttcaatacgcggcgtttctccggtatcggtggtcgtactgttttgcgggtcatccttttcacgttttgccaggctgccgtaagctttcattcccagcacaccatcaattaatggtccactggtaaagaactgaccgttataggtgtcaccgcgatcgcgatgttcctgaatggtggtatcgacggtaacggtaccgctccatttctgaccgatttttttggtgatgatattcactacaccgccgagcgcatcggaaccgtacaggctgctcatcgggccacggaccacttcaatacgttcgatggaatcgaccgggatccagttcagatcgaaatcattgtggcggaagacggcattgcgggagttcacgcgtttaccgtcgacgagaatcagggtatagctgctgtccagaccacgaatactaacgcccttacggttatccccttcgttcgtcagttgtacgccaggcacttctttgaggacatccttcagattctgtaccggttttcgctgcaggtcttcctgggtaatgacgctgatactggcaggtgcatctttaagattttgttccacggaagatgcagtgacaaccatcgtttcgccatcatcatcgaccgctaacacaggccatgcacaagaaatagcggacaaacacagcccgacccgtacgaaagggttcaacctaaacattccatatctccatgaggtaactacgaaaataaaatgggttatcgctcacatcttcttcacgtccccttgcgtacggcagcatcgcggtggacttattttttatgcaggtgatcatcccagaaagccggaacagcctctgatttgtcagccttttttgattgcggcgtaacgataatgcaaacgataacaattatcaatccaaatgttaaattttatatccgcatgatttgtcagggaaatggaattgaaaaagccctctcggttgagagggcttagcaaggaagggaggaaacttatttcttatcgttctgcgggaacttcatttcgctgtagcgtacgaagtgagttcctttaatcagcttgtagccgaaccaaataatcaggaacagcgggataccaatatacgttgccgctacgccgccccagtcaatagtatctttcaggaacgcttcgtagttctggcccaaagtgataatcagacacagaatgaatgcgaagatcggccccagtgggaagaaaccactacggtacggcagatcgttaatgtcgtgtccctgcaatacgtaaccgcgacggaagcgatagtggctaatggcaatccccagccaggcgataaaacccgtcatcccggaggtgttcagcagccacaggtataccgtctggttgccaaacatggaggtcaggaagcacagaccggcaatcaccgtcgtcgcatacagcgcattacgcggcacgccaccacggctcagtttagcgaaaatgcgcggcgctttaccgtcacacgccagggtgtacagcatacgagtagacgcatacataccggagttacccgcactcagcaccgccgtcagaataactgcgttcatcaccgccgccgcagagagcagacccgcgtgctggaacaccagggtgaacggactaacgctgatgtctttaacatcgttacgcagcaggctcggatcggtgtacggaataatcaggctgataatcaggatcgcgaacacatagaacaacaggattcgccagaacacctgacgtaccgcgcgtggaatgtttttcgccggatcttcggactcgcctgcagcaataccgatcagctcggttccctggaaagagaagccgacaatcatagctacgccgatcatcgccgcaaaaccaccagcaaacggcgcttcgccgattgtccagttgctccagcccgcaggctgcgcgcctttgaagataccgataatcatcagcacgccaacgatgataaagacaataactgtcgtgactttgatcagactgaaccagtattccgcttcaccaaagccacgaacactgatgtagttcagcaggaagataacgccgaggaacaacgcactccagatccagcccggtgtatccgggaaccaccagctcatgaccagctgagctgcaaccaggtcaacggcgatagtcaccgcccagttgtaccagtagttccagcccagcgcgaagccaaagccttcttcaacatagttctgaccgtaagtggcaaagctaccggaaaccggcatatatgcagccagttcaccgagactggtcatcaggaagtaaaccatcaggccaatcagcatatagctgagcaatgccccgcccggacctgcctgagaaatcgttgcgccagaggcaacaaaaagacctgtaccgatggaaccgccaatggcaatcatcgtcaggtgacgcgcctttaattcacggcgtaagcccggcgcttctgtggttttagtttcggaaaccatacaaaaatgctatccatcttaaaaatgaggcgcgattgtagcagacgattggcaatccttccggcagaaatacacggttataagacaccttcatgatcgcccagggattataagtaaagcagccaatctcttttctggcgaatgcatgctgaaggcgctgcgtcacgaaatcgacacagcaccagcatgttcttgtacagcaacttaacgcggcacatttgcgggatcgcaatagtccagaaagcgccgtagcgcgttggaaaggtgtttttgccgatgatgtatacgccacaacgtacgcatcaggcgcggcagagggaccgcaacttcacttaatgtgcctgcctgcaattgatcttcaatcacacgtcggctcaggcaactaattcccaacccatgacgcaccgcatgtttgattgcctcggagttacctaattccatcgccatctcaaacttcggtaaatgactcagcaacagataatcgacaatctcccgcgtgccggaaccgcgttcacgcaggatccacggcgcagcggccagctgttctaaggtgaccggaccacgggccaacgggctagtcggcgcggcgaaaaccaccagctcgtcttccagccacggttcagaaatgatttcagtgctgtggcacggtccttcaataaagccaatatcaacgcggaaatccagcaccgcttgcatcacgtcctggctattcccaacgctaagttcaatcggcaactgcggataatcatggcgataacgggcgataactgcaggcagaatgtagttaccgatggtactactggcatagatacgaatcgcgccgttgtcttcgcgaaacagttgttcgatttcaaccgcctgttcaagcaatgccaacgcacgcggatagagcagccgcccgtgttcattaacaaccagtcttttccccacgcgatcaaacagttgcacgccaagctgcccttccaggtcggtcaaggctgcgctcactgcactttggctcaacgccagcatcacgctcgcctgggtggtacttccacttttcaatacttctgcaaaaacttccaactgccggagggtgatgtgcatagtcgcttaccacttataaagattaattataaatatataatcaattttatttttaaaccagttagtcgtaaccttatgcccggttaaaggagagggttatgacgaatatcaccttacagaaacaacatcgtacactgtggcattttattccggggttagccctgagtgcagttatcaccggggtcgccctgtggggtggttccattcccgcggttgcgggtgccgggtttagtgccctcaccctcgcaatcttgttggggatggttttaggcaacaccatctatccgcacatctggaaaagctgtgacggtggtgtgctgtttgccaagcaatatttattacgtctgggtatcattctttatggcttccgtctgacgttcagccaaattgccgatgtcggtatcagtgggatcatcattgacgtgttgacgctgtccagtaccttcctgctggcttgcttcctggggcagaaagtgtttggtctggataagcacaccagctggttgatcggtgccggtagcagtatctgtggtgctgccgcggtactggcgactgagccggtagtgaaagcggaagccagtaaagtaaccgtggctgttgcaaccgttgttatcttcgggaccgtcgcgattttcctctacccggcgatatatccgctgatgtctcaatggtttagtccggaaactttcggtatctacattggttctactgtgcacgaagtggcgcaggtggtggcggcaggtcatgccatcagcccggatgcggaaaacgcagcagttatttccaaaatgctgcgcgtgatgatgctggctccgttcctcatcctgctggcggcgcgtgttaaacagctgtctggggcgaacagcggcgagaaaagcaaaatcactattccgtggtttgccatcttgttcatcgtagttgccatctttaacagcttccacctgttaccgcagagcgtggtgaacatgctggtaacgctggataccttcctgctggcaatggcgatggcggcgctgggtctgaccactcacgtcagcgcgctgaaaaaagctggggcgaaacctctgctgatggcactggtactgtttgcctggctgattgttggtggtggtgcgattaactatgtgattcaaagcgtcatcgcataaaccactacatcttgctcctgttaacccgctatcattaccgttttcctccagcgggtttaacaggagtcctcgcatgaaatacattggagcgcacgttagtgctgctggcggtctggcaaatgccgcaattcgcgccgccgaaatcgacgcaaccgcgtttgccttgttcaccaaaaaccaacgtcagtggcgtgccgcaccgctcacgacgcaaaccatcgatgaattcaaagccgcctgtgaaaaatatcactacacaagcgcgcaaattcttccccacgacagttatctgattaacctcggacatccggtcactgaagctctggaaaaaagccgcgatgcctttatagatgaaatgcagcgttgcgaacagctggggctttctttgctcaacttccaccctggcagccatctgatgcagattagtgaagaggattgccttgcgcgtattgccgaatccatcaacattgcgctggataaaactcaaggtgtgacagcggtgatagaaaacaccgccggtcagggcagtaacttagggtttaaattcgaacatctcgcggcgattatcgacggcgtggaagataaatcccgcgtcggcgtctgcattgatacctgccatgctttcgctgccgggtatgatttgcgtactccagccgaatgcgagaaaacattcgcggattttgcccgtactgtcggctttaagtatctgcgcgggatgcaccttaacgatgcgaaaagcacctttggcagccgcgttgaccgccatcatagcctcggtgaaggcaatatcggtcatgatgcgttccgctggatcatgcaggacgaccgtttcgacggcattccgctgatcctcgaaaccatcaacccggatatctgggcagaagagatcgcctggctgaaagcgcaacaaactgaaaaagcggtagcctgaagatgaataaccgggaaaaggagatccttgcaattttacggcgtaacccgctgattcagcagaacgaaattgcggacatgctgcaaatcagccgtagccgcgttgcggcgcatattatggatttaatgcgcaaaggccggattaaaggcaaaggttacattctcaccgagcaggaatactgcgtagtggtggggacaatcaatatggatattcgcgggatggcggatatccgttacccgcaaagcgcttctcatcccggtacaattcattgcagtgcgggcggcgtgggacgcaacatcgcccacaatctggcgctgttaggccgtgacgtccatttgcttagtgtgattggcgatgacttttatggcgaaatgctcctggaagaaacgcgccgtgccggcgtgaatgtctccggctgcgttcgtttgcatggtcaaagcacaagcacgtatctggcaattgccaatcgagacgatcaaaccgtgctggcgattaacgatacccatctgctggaacagttgacaccgcaactactgaacgggagccgcgatttacttcgtcatgcgggcgtggtactggctgattgcaacctgacagccgaggcgctggaatgggtctttaccctcgctgatgaaatcccggtgtttgtcgataccgttagtgaattcaaagcgggcaaaatcaaacactggctggcgcatattcacaccctgaaacccactttaccggagctggaaattttatggggacaggcgatcaccagcgatgctgaccgtaataccgcagtgaatgcattgcatcagcaaggtgttcagcaactgtttgtttatttgcccgatgagagtgtttattgcagcgaaaaggatggagaacaatttttgctgaccgcgccagcgcatacgacagtagacagttttggtgctgacgatggttttatggcgggcctggtatatagctttcttgaaggatacagtttccgcgacagcgcccgttttgcggtagcctgcgcggcaattagccgcgccagcggcagcttaaacaaccctaccctgtctgccgataacgcgcttagtttagtgccaatggtgtaacaatgttgccggatgcgacgcttaacgcgtcttatccggcctacaaatcaggcaatttcagcaagtaaatgtaggcctgataagcttgcgcatcaggcaatgacactcaagctaaaccaataaagaacccggcaatggtcgcactcatcaagttggaaagcgtcgccgccgccagcgcccgtaaaccaagctgggcgatttccggcgcacggtgtggcgcaaccgcagaaaacgcccccaccaccaccccgatagaaccaaagttagcgaaaccgcacaacgcgaaggaaataatcgccacagttttagcatcgagagtgccagccgtttgcagatagggactgaaattgagataagcgacaaattcatttattgccagtttctgtccaatcaaactcccggcaagattcgcatcactccagtccacacccatcacccacgccagtggagccagcaggtaacctaaaatggactccaggctggcatgttcaaaaccaaaccagccaccaacgccgccgataataccgttaatcaacgcaattattgcaacaaatgccatcaccactgttgccacacctgcggcgattttcagcccggtcattgcccctgtcgcagcggcttcaataatgctttttggcggtgtttcggtgaaagagaggttattaaaggaaacctggctagattccgttgccgggcttaacaggcgggcaaacaagatcccgccagggatcgccattaaacttgccgccagcagatattccacaggcacgcccagtgcggcgtaaccaatcattgtgctaccagcaatgctggccatgccactacaaatcgctgtaaataattcattgcgattcagacgatcgataaagggtttgacgattgccggaatttcgttttgcccgaggaaaatggtggtgaccgcgacgaaactctcgatcttgctgatatttaatgctttctggaagataccgccgagaattcgaattaaaatccccatcacaccgatgtagtagagaatactcaccagcgcggtgacgaagataattgccggtaacaccctgaaaccaaagataaatcctgcaccatcaaataaggtatccattttcggtccgaccagagaaccgaagataaatgcgctacccgcgtcgctgtacgccatcactttatgcacgccaaaagcgactttttcagcgacccaacgccctggcggtaaccaaagcataatgccgccaatcacgacctgtaacactaacgccgcgccaacggtacgcaggctgatcttcttcttgtttacactcagtaaaaacgcaatcgtcagcaataccaccattcccagaacacttctcatgacatccatagtgattatctcttcatgtcatattgggcgacggctttctgcccatcagaaatagccaggcctgcatcttgcgataccggcccggcttgttatcaacacttaatgggttttgatgtagccgcgcacgcactcttcgactaatccccagaaccagtctgtatcaatagtgatgccgactttggtattggcgggcttgccaagaacgcccagctcgtcgcagacggtacgcccatagcaagggccactgttgacgtccacttcgacgtacatctcctgggttttaatgccatcagggttaatcagataaccgatgcaggtggcgtcgtgcaccgggccgccagcaaggccgtagttttcgaactgcgttttgagagtgaagttcatgatgtcgctgaacagctctccggcggggccgcctgccctttccatccgagcaatcacgtccggggtgcaaacggtctggttggtgagatcgaggcccatcatcactaatggaacgccggaggtgaacactacgcgtgcggcttccgggtcggcaaagatgttgaactcggcagatggcgtgaagttgcctgtaccgtaagcgccgcccattagcacaatttcacggattttgggcaggatcgcgggttgcatacgcattgccaccgcgatattactaagcggaccaaccggcaccagagtgatatcgccatcgcttgccatcagggtatcaatgatatatttcaccgcatgagtgctttctgcctggcgggtcagcggctcgaataccgggccatccagtccggtttcaccgtgaatattatcggcaacgatttgttgacgcataatgggctgcggcatccccgcataaaccggaacattaatctccagtttctggcaaacattcaggccattaattaatgttttatcaagcgtctgattacccgctacaatagtgatgcctaataaatctattgccggatgtttcgccgccatcattatagcaatagcatcatcatgacccggatcacaatccagaataatttttctcttttccattgtttatttcctctgtttccagttgcgttattttttctacagcaaagaaaattcgaccgggccgatgattgaatcttaacaacagcgtacgtatgctaaatatgagaaatctcatagcggataaacatcgtgaaagaaatccacaataatgatcttaagcagcaattgatgagtgaatccgcgtttaaggattgctttttaacggatgttagtgccgatacgcggctgtttcattttttagcgcgtgactacattgtgcaggaagggcaacagccgtcctggctgttttacctgacgcgaggccgcgccaggctttacgccacgctagctaatggtcgcgtgagcctgatcgatttctttgccgccccctgttttattggcgagattgagttaatcgataaagaccatgaaccgcgtgcggtgcaggctattgaagagtgttggtgccttgcgctccctatgaaacattaccgtccgctgttattaaacgacacgctatttttacgaaaactctgcgtcaccttaagtcataaaaattatcgtaatattgtttctttaactcagaatcaaagttttccgttagtgaatcgcctggcagcatttatattactcagccaggaaggtgatctttatcacgaaaagcatacgcaagcggcagagtatttaggcgtttcttatcgacatcttttatatgttctcgcgcagttcattcacgacggtttattaattaaaagcaagaaagggtatctcattaaaaacagaaagcagttgagtggactggcgctggagatggacccggagaataaattctccgggatgatgcagtaaaaattattttcaatagcgcgattgccggatgcaacgcttaatacgttttatccggtctacaaatcgagcattacgccagaccaataaagaacccggcaatagtcgcactcatcaggttggaaagcgttgctgctgccagcgcccgtaaaccaagctgggcgatttccggcgcgcgttttgggctaatagcgctaaatgcgccaacgacaacaccgatagaaccaaagttagcaaaaccacaaagcgcaaaggagataatcgcaatggttttcacttccagcgtgccgcccgtttgcaggtatggggagaaactcaggtaagcgacgaattcgttaatcgccagtttctgcccaatcaggctacccgcaagattggcatcactccagtccacacccatgatccacgccagcggtgccagcacatagccaaaaatactttccagagaggcattggcgaaaccaaaccagccgccaattccgccgataatgccgttgatcagcgcaataattgcgacaaacgccattaccaccgtcgccacaccagcggcgatttttagcccggtcatcgcaccgctcgccgccgcttcgataaagctttttggcggcgtttcgctgaagctcagattttcaaatgtgacctggctaggctcggttgccgggctaagaatacgtgcaaacaaaatcccgccagggatcgccatcaggcttgccgctaacaggtagtcaattggtacgcccattccggcataaccaatcatcatgctaccagcaatggacgccatcccgctacaaattgcggtaaacaactcgttgcgattcatgcgatcgataaacggtttaacgatcgccgggatctcattttgcccgaggaaaatagtagtaaccgcaacaaaagattcgattttgctgatgttgagggctttctggaaaatgctgccaaggatgcgaatcagcagccccatcacgccaatgtagtacagcagactgatgagcgcagtaacgaaaataatcgccggaagtacgcgaaaggcgaagataaaacccgcaccgtcaaacaggacatccattttcggcccaaccaggctaccaaaaatgaaggcgctaccggcatcactgtaagacatcactttatgaacgcctaatgccgcctgttctactgcccattttcccggtgggaagtagagcatgatgccaccaatagcgatttgcagcagcagtgcggctccaaccgtgcgcaaactgatgctctttttattcacactcaacagaaatgctattgccagtaacaccaccatccccacaacacttctcattatatccataatgattttcccttcatgccggtaaacccggcgtcagcgccaggttttggtatgcttgatgagtacgggcgacggctttctgcccgtcagaaattaacccgcgagacgctgatattctttggcaatttcgctcgccagaatggcgttgttgaacaccagctggatgttggatttcaggctgtcaccgccggtcagttcagcaacgcgcgccagcaggaatggcgtactttctttaccaatgactccctgagcttcagcttcagctaccgcctgatcgatcgccgcattgatagtgtgttccggcatagcaaactgttccgggatcgggttcgctaccacgaggccaccgttcagaccgctttgccatttcaccaccattgcacgggcaatttcgctggcgctgtcgagacgaatgctgacgtcaaacgggctggtgcggcagaaaaacgcaggcagcgctttagtctgatagccaattaacggcacaccgaaggtttctaaatactcagtggttaatcctaaatcgagaatagatttcgccccggcacaaacaacggtgacattagtatttgccagttcttgcaaatcggcagaaatatcgaaggtatgttccgccccgcgatgcacaccaccaattcccccggtggcaaatactttaattccggcaagcgccgcaataatcatcgtactagccacagtggttgcgccattttttccggcggcaacaacaaaaggtaaatcgcgacgactaactttggtcacgttatgcccttcacgacccagtaattcaatttcttctttgcttaaccccactttcatcacgccgccaataatggcgatcgtggcaggtacagcgccctgtttacgaatagtttcttcaacttcaattgcggtctgggcattttgtgggaacggcatcccgtgagaaataatggtgctttccagcgccacaaccggttttttgttttttaaagcgtcctgcacttccggggaaatttgtaataattcaggggaaatttttaattcagacattctgcgttctccactaagcttataacgttggcaatgcttaaatcggggttattggtgtattcacaggagagcgccatactgctacatccctgtgcgaaacgaacagattcggcaaacggcattccgtctacccaacagctagcaagtcccgccatcatggcatcgcccgctccggtaacattaataacattggttttgatcggcgcagaccagccactttcaccgctgatatcgctgtaataaacgccgtcgccgcccatgctcaataccagtcggttcaggccatgttgatggaaccaggcagcaacttttgccacatcttcacgcccactcagcgcaatcccactcagggtttccgcttcaaggcggtttggcttgagagtgtggatctgatttagacggtcgcgcactttgacacatttccatgcgctaaccggatcgacaaatacgggtacgttggcggcattatccagaatccatgccagtgcctcttcactgatattacagtccgcgacaatgacctttgccctctgaataaattcaccgtgctgtgcgagatattcagctgtaatagcgttgctaatattcatgtcatttatagcaaccagcatttcaccggtattatcgagtaaacttaaataactgctcgtattttctcccggcacaatcaggcatttatcgacataaacgccagattgattggtttgcgttagcaggctttgaccataaaaatcactgcctacggcgctcagtagccaggctttgttacccagcaacgccaggttttgtgcaatattgcgccctactccaccaggcgtaaattttattttacctggattactatccgcataatttaaactttcatgactatatccggcgacatcaatattcgcgctacctataattacgacataatccttttcgcgcatagcacgtcctctggtaaaaaattaccaaccctgtcaatccacaagaatatagatactgcaaagacggtttaaacatgtgttcatatttaaacatgtgctcatagtatgcatgttttacgtaaagtaaattaccgccagagaggcaaaatgggcagatttgagcaggctcacaaaatgcgattaaatgcctgaattacaaaagcgaggaatttgtgacgggatgcacagaacagaacaataaaaaagggcagaaaataatctgcccttgaggaaataacctgagtgtttgatgaacgtttgaagtttctactgaaagataaaaccatttaaattcataaaattacattcacaaaccggtcattctctttgcgctcatcaaatgttacaggacaggaaatttctgccctgtaacacaccttttattacgctgctttcgctactgcgtccacttccggacgtttcaggaaggcataggccaaacccgccaccagcgtaccggcaataattgctaccaggtaacccaataccggcgtaatagcgccagggatcagcagaacaaacagaccaccgtgcggtgccatcagtttcgcaccaatcgccatactgattgcgccagtcagcgccccacccacgatacagcacggcagcacacgcatcggatcacgagcagcaaacggaattgcaccttcgctaatgaagcacagtcccaataccagagcggctttgccaccttcctgctgcgctttgtcgaatttgcgacgcgccaccattgttgccagacccattgccagcggtggcaccatacctgccgccataatcgccgccatcgggccataggtttgagtactcagcagacccacaccgaatgcgtacgctgctttgtttaccggaccgcccatgtcagtacacatcatgccaccgaggatcgcccccagcagaaccgcattcgcagtccccatggtctgcagccagtgagtcagcccttcgagaatgccagcaactggtttaccgatcaggtagatcatcgccagaccgaccaccagactggaaattagcggaatgatcaggatcggtttcagcgcctccatactctgtggcagtttcaattgcgtactgattaacttcgcaatgtaaccagccaggaagcccgcaataataccaccaatgaagccagaaccggtgctgaccgccagcataccgccaatcagacccggagtgaggcccggacgatcggcaatggaaaaggcaatataacctgccagtaccggcaccatcagcgcaaaggcactaccaccaccaatctgcatcagcgccgcagccaacgtacccggctctttaaacgcttcgataccaaaagcaaaagaaagcgcgatacacagaccacctgcaacgaccatcggcagcatgtaagaaacgcccgtcagcaagtgacggtatgcgcctgcactctctttcttactttcagtggtcgccgtttgagctttgcccgccggttcatacggcgttgcttcagcaaccgctttatccagttcctgcgcggttttcttcagcgccagaccggtagaggtacgatacatcggtttaccagcaaatttcgccagatccacttcgatatctgccgccacaatcaccagatccgctgctgcgacttcttcgggagtgattgcattacccgcgccaacagaaccacgggtttcaactttcacccaccagccacgttttttcgcttcggtttcaatggcttcagccgccataaaggtgtgtgctacgccagtcgggcaagcagtcaccgcaactacgcgtttcggaccgctggcggcaactggtgctgtcgcagcgaccggcgcagtgtaaggtttcgcatggcctttggcttcactcaggaacagctcagggtgcgcaactgcccgggaaatatcgcccagccagacatttttaccgttcagcgcgctgtcgttcgggatggaatcaccgagaacaatcgccatttcagcgtcgttcggattgtcgatgatttccagttttgcttttcgcgccgccgcgcccagcagggtcttcgccatataggcgcgtgcctgaccgagattagcgtcaataatcagcagcgttttcattatgcctctcctgctgtcagttaaaaggttgtaagtcgacgcgcgccatcattgcggccaactgcggacgatcggtaatacccacattgctttgacttaccgccagggctgcaacagctgtcgccagacgcagtgtgtgttcactggattcacgcatcagcaagccataaatcaggccaccaaccatagaatcccctgcgccaacggtgcttacgacatcgacactcggtggtttggcgatccattcgccggaggcattaacccaaagcgcgccttcggcacccagactaataacaacatgcgcgatgccttgttcacgtagcgcatgtgcagcttcaatcacatctttcatttcaggcagtttacggcctgcccagatttccagctcgcggcggttaggtttcaccagccacggtgccgctttcaaacctgctactaacgcttcacggctactatcaaagataatgcaaggacactgactacgcaggcgagtcatccagtcggtgaacgcttccgggctgacgccactcggtaagcttccgctgacacagaccatatcgaactgaccgagccagctcagagaatcagtcacaaagcgttcccagtcggcgggggtgacttcaaaaccgctgaagttgaagtcggtcacttcgccgtctttttccgtcagcttaacgttaattcgggtgcgcccctgtacaacctggaaacggttggcaatgcccagctcgctgaacagttgctgaaaaccatcctgattgtctttacccaggaagccgccaacggtgacatcaattcccaggtcttttaatactttggccacgttgatgcctttacccgccgcatgcagaccggtggttttcaccaggttcacttcgccgcgttcaatttccgggcagaaaccaacaaggtcataagccggattaagggtgatagtagcaacacgtctgctcattatgcgccctccccaagaccagcagcgatagcgtcgccgattgctttcagcgcctgttcagcatctgcaccctgggcggtaaagcgtaggcgatgacctttcttaacgccaagtgccacaactttcatcagactacgtccgtttgccggtttgccggtaccatcaaggtttgtcacggtaatatcactgttaaattgtttaatggtattgaccagcatggtacctggacgagcatgcaggccgtgttcattgcgcaccacaaactccgcgcttaacacgtcgtcggtcggcgcatcatcgctggtcagcagcgccagcaacgttgccgcatccgctttcagcaagcggtcagctttattgtcgagcaataaatcagcgagacgcttaagaaccgcgatgggctgatcgtcattcatcgccacactcaccagcatggctgccgtttcgccgtccacatcaaaagcatttgccgcacggcttaccgcaatcgcgctacgcagattgccttcggcgctatcgctcagccagataccctgtccgagattcagcggttgttcattgatggctttggtgacgaaagtggcgtcaactgcccccgcctctttcagacgcgcagcgttcagcgcctgaagagtcagcagatcgctggcgacgatatccagtgtcagcatttcgttgtcgagcttcagctgctcactctgcttttcgcccatcagtaatgcgcgaagttcttctgctgttgttgcactcttcagttgttcagcaacggaatcatcgctcagtacgtgggtcagctggcgtagcaggcccagatgttcatcgctgctggcagcaataccgattgccacgtacgctacctgaccgtcaccccaggtgacgccttccgggaactgaaatacctgaacgccggttttcagcacctgatcgcgggtgtcggtagtgccgtgtggaatagcaataccattgccgaggaacgtactggtttgctgttcgcgcgccagcatgccattgacgtagccttctgctacattaccggcctgcaccagcgccgcagcgacctggcgaatcgcctcttctttgtctccggccttttcgcccggatggatgtcctgtacggataactggaacatagttctcctctcttgctgaattgaaacgattcagcctctatgagaaaaaaagcgccaacctggcttagggttaaagacaagatcgcgctgaaacgtttcaagaaagcataatacttctgtttcagcacgcaaggaaagccgtaaagttatgagcaaaagtttgatgtgctgcacaattttttgccatttttcctaattgctgatgggaaaatccgttatcagcaatttcatttcagcagcgtcagcagccaatcagcaacagtgaaatggcattttgactattcgtggcgcttttgatttcgctgtctgtttattttctgacaagcagcgtaaactccgcgtcttcctcttccagtgatcgaccagcatgcataactcccccgcagtctccagcgcgaaaagctttgacctgaccagcacggcgtttttaatcgttgcctttctcaccggtattgcgggcgctctgcaaaccccgacactcagtatttttcttaccgatgaagtacatgcccgtccggcgatggtgggattcttctttaccggcagcgctgtcattgggattctggtaagtcagtttctcgccgggcgctctgataagcgcggcgatcgcaaaagcctgattgtcttttgctgcctgttaggcgtgctggcctgcaccctttttgcctggaatcgcaactactttgttttgctattcgttggcgtctttcttagcagctttggcagcaccgctaacccgcaaatgtttgcccttgcccgtgaacatgccgacaaaaccggacgtgaggcggtgatgttcagctcttttttacgcgctcaggttagtctggcatgggtcattggcccaccgctggcttatgccttagcgatgggtttcagctttacggtaatgtatctgagcgcagcggtagcgtttattgtttgcggtgtgatggtgtggctgtttttaccgagcatgcgaaaagagcttccgctggcgaccggcacgatcgaagcgccgcgccgtaaccgtcgcgatacgctgctgctgtttgtcatttgtacattgatgtggggcagcaacagcctgtacatcatcaacatgccgctatttattatcaacgaactgcatcttcccgagaaactggccggtgtgatgatggggaccgccgccgggctggaaatcccgacgatgttgattgccggatatttcgccaaacgtctgggtaagcgtttcttaatgcgcgttgctgccgtgggtggcgtctgtttttacgcaggaatgctgatggcgcatagtcctgtcattctgttgggcttgcagctgctaaatgctatttttattggcattctgggcggcatcgggatgctctattttcaggatctgatgcccggtcaggcgggtagtgccaccacgctctataccaacactagccgcgtgggctggatcatcgcaggaagtgtggcgggcatcgtcgccgagatctggaattatcacgctgtgttctggtttgcgatggtgatgattatcgccactctgttttgcttactgcggattaaagatgtttaaggcgcggtcagcatttccagatcgataagccaggtcatggcctgctgacggctgttaccgcacatttcagcgctggcttgtaagcctgcacagactttcggtcgcagtgggctggtgaaaattttacagcgttgctgttcatcaagctgaatgcagggcgtattggcgggcttgccatctggcataccgggaatagggctggaaatactaggggcagtgcaacacgccccgcaacccggacggcattccatacgttgttctcttaaggttaaccaccggattgatgagcgcgcacagtaccaccttttttgcaccagcaaaagtgcgaataccacttgcccgaaaggcccgtcgcgagtactttgtcgcgatatttttgacattttcgactacaggaatttttcgatgccaagagcgaacgaaattaaaaaaggtatggtactgaattacaacggcaaactgctgctggttaaggatattgatattcagagccccactgcccgcggtgccgctacgctgtacaaaatgcgtttttctgatgtccgtaccgggctgaaagtagaagagcgtttcaaaggtgatgatatcgttgacaccgtgacgctgacccgccgttacgttgacttctcctatgtcgatggcaacgaatatgtctttatggataaagaagactataccccgtataccttcaccaaagatcagattgaagaagagttgctgtttatgccagagggcggcatgccggacatgcaggtgctgacctgggacggtcaactgctggcgcttgagctgccgcagaccgttgatctggaaatcgttgaaaccgcaccaggcatcaaaggggcatctgccagcgcccgtaacaaaccggcgacattgagcactggtctggtgattcaggtaccagaatacttaagcccgggcgaaaaaattcgtatccatatcgaagaacgccgttatatggggcgtgctgactaacttcagccgcatgcagaaaagggatagctcaggctgtcccttttttaatttattataccaatcttctattttgcgcttcctgaacaccttacgccctcaattttcactcgttgattgatcgccctcacacttcatcgcattaacaatccagaccaatttcaattgctgtcatataactttacactgtcgttgttaattaatcgttactaagacgtgactcctatgaatacaatcgcctccgttacgctcccgcatcatgtacacgctccacgctatgatcgccagcagttgcaaagtcgtatcgttcattttggctttggagcctttcaccgcgctcatcaggcgttactgaccgatcgtgtgctgaatgcccagggcggcgactgggggatctgtgaaatcagcttgttcagcggtgatcaactgatgagccagctccgcgcacagaaccatttatataccgtgctggagaaaggtgcggacggcaatcaggtgataattgtcggtgccgttcacgaatgccttaatgcaaaactggattccttagcggcaattattgagaaattttgcgagccacaggtggcaattgtttccctgacgattaccgaaaaaggctattgtattgacccggccaccggtgcactcgacaccagtaatccgcggattattcacgatctacaaacccctgaagaacctcactccgcaccgggtattctcgtcgaagcactgaaacgccgccgtgagcgcggccttacaccgtttaccgtgctctcctgcgacaatattcccgacaatggtcatgtggtgaaaaacgcggtgctgggaatggcagaaaaacgtagcccagaactcgccgggtggataaaagagcacgtcagttttccgggaaccatggtcgaccgcattgttccggctgcaaccgacgaaagtctggtggaaatcagccagcatctgggggtgaatgatccctgcgcgattagctgcgaaccgtttatccagtgggtggtggaagataacttcgtcgctgggcgtcctgcctgggaagtcgcaggtgtacaaatggtgaatgatgtcctgccatgggaagagatgaaactgcggatgcttaatggcagccactcttttctcgcttatctgggttacctcagtggattcgcccatatcagtgattgcatgcaggatcgcgcatttcgccatgccgccagaacattaatgctggatgagcaagcgccgacactgcaaattaaagatgtcgatttaacacaatatgcggataagttaattgcacgttttgctaatccggcgctgaaacataagacctggcaaatcgcgatggatggcagccagaaattaccgcaacgcatgctggcaggtattcgcatacatcaggggcgcgaaacggactggagcttgctggcattaggcgttgcaggctggatgcgttacgtcagcggcgttgatgatgccggaaatgccattgatgttcgcgatccgcttagcgataaaattcgcgaacttgttgcgggcagcagcagtgaacaacgcgtaaccgccctgctttccctgcgtgaagttttcggtgatgatctgccagataacccgcattttgtgcaggccatcgaacaagcctggcaacaaatcgtacaattcggcgcacatcaggcgctattaaacaccctcaaaatttaacgatttctgcggttaaagcggatgaagctcaccttcgtccgctctccccttctcttttctgccttttttagccaggattaacgctcagttaacttaccagagtattgcggagccgttgtgaccaggaccaacctcatcaccggttttctcggcagcgggaaaaccacgagcattcttcatctgttagcccataaagatcccaacgaaaaatgggcggtactggttaatgaatttggggaagtcggaattgatggtgctttgctcgccgatagcggcgcattgctgaaagagatccccggcggctgcatgtgctgcgttaatggtttacccatgcaggtagggttgaataccttactgcgtcagggaaaaccagaccgcttgttgatagagccgaccgggctgggccatccgaaacagatcctcgatctgttaaccgcaccagtctatgaaccgtggatagatctgcgcgccaccttgtgcattctcgatccgcgcttgctgctggacgaaaaaagcgccagcaatgaaaacttccgtgaccagctggctgccgcagacatcattgtcgccaataaatccgaccgtacgacgcccgaaagtgagcaagcgctacagcgttggtggcagcaaaatggtggcgatcgacaattaattcacagtgagcatgggaaagttgacggtcatcttctggatttgccgcgtcgcaatttagccgagttgcccgccagcgccgcgcattctcatcagcatgtcgtgaaaaaagggttagcagcgttaagcctgccagagcatcaacgctggcgtcgcagtctgaacagcgggcaaggatatcaggcctgcggctggatattcgacgctgatacggtattcgacaccattggcattctggaatgggcgcgacttgcaccggtggaacgcgtcaaaggcgtgctgcgtattcccgaagggctggtgcgaatcaaccgtcagggcgatgacctgcacattgaaacgcaaaacgttgcgccaccggacagccgtattgagctgatttccagcagcgaagctgactggaatgccttgcagagcgcgctgttgaagcttcgtttagcgactaccgcgtaaggttgcctgcgtttttcagtaagataattagagaaaatatgattaaaaatttgccgcaaatagtgttgttgaatattgtcggcctcgcgctgtttctttcctggtatatccccgttaatcatggattctggttgccgattgatgcggatattttttatttctttaatcagaaactggtcgaaagtaaggcctttttgtggctggttgcattgaccaacaatcgcgccttcgacggttgtagtctgctggcgatgggtatgttgatgctgagtttctggctgaaagaaaacgcccctggcagacgacgtatcgtgattattggtctggtcatgctattaactgcagtggtattaaaccagctgggtcaggcattaattcctgtaaaacgggccagcccaacattgacttttaccgatattaaccgcgtcagcgaactgctctctgttcccacgaaagatgccagtcgagatagctttcccggcgatcacggcatgatgctgcttatttttagcgcattcatgtggcgttatttcggcaaagttgcaggccttatcgcccttattatttttgtggtttttgcatttcccagagtaatgattggcgcacactggtttactgacatcattgtcggtagcatgaccgtgatattgatcggtttgccctgggtgttgctgacgccattaagtgatcgattaatcaccttttttgacaaaagtctaccaggaaaaaacaaacatttccaaaacaaataactcacagtaattaacatcatcagggttatttttatagtgaggataatcctgatgatgcgcaccgtgctttcatctatcgaacgcaaaaatcattctctaagtaaatgaatggattgcatgcgtttcactcaattgtactttaattgaccaaccccgcttattaactttctgtatcactttttcttataaaaaatcatgtaaaaccgctcgccaagaccgcaccaatcgggtaatctcgaactcgttttgcctcggcggtagattatcctcacagcatataattttgtgcgttagtccacagatttggccttaaggaattgtttcaacatgcccaggtaattagtctcgtgtcgcttggcatttttttataacgatatttgtcgttaaggacttcaagggaaaacaaacaacatggtcaaatctcaaccgattttgagatatatcttgcgcgggattcccgcgattgcagtagcggttctgctttctgcatgtagtgcaaataacaccgcaaagaatatgcatcctgagacacgtgcagtgggtagtgaaacaagtagtctgcaagcttctcaggatgaatttgaaaacctggttcgtaatgtcgacgtaaaaagccgaattatggatcagtatgctgactggaaaggcgtacgttatcgtctgggcggcagcactaaaaaaggtatcgattgttctggtttcgtacagcgtacattccgtgagcaatttggcttagaacttccgcgtagcacttacgaacagcaggaaatgggtaaatctgtttcccgcagtaatttgcgtacgggtgatttagttctgttccgtgccggtagtacgggacgccatgtcggtatttatatcggcaacaatcagtttgtccatgcttccaccagcagtggtgttattatttccagcatgaatgaaccgtactggaagaagcgttacaacgaagcacgccgggttctcagccgcagctaataaaccgtttggatgcaatcccttggctatcctgacgagttaactgaaagcactgcttaggcagtgcttttttgttttcattcatcagagaaaatgatgtttccgcgtcttgatccaggctatagtccggtcattgttatcttttaaatgttgtcgtaatttcaggaaattaacggaatcatgttcatacgcgctcccaattttggacgtaagctcctgcttacctgcattgttgcaggcgtaatgattgcgatactggtgagttgccttcagtttttagtggcctggcataagcacgaagtcaaatacgacacactgattaccgacgtacaaaagtatctcgatacctattttgccgacctgaaatccactactgaccggctccagccgctgaccttagatacctgccagcaagctaaccccgaactgaccgcccgcgcagcgtttagcatgaatgtccgaacgtttgtgctggtgaaagataaaaaaacattctgtagttctgcgaccggtgagatggacattccactcaatgaattgattccggcgctcgacattaataaaaacgtcgatatggcgatcttacccggcacgccgatggtgccgaacaaacccgcaatcgtcatctggtatcgcaaccctttgctgaaaaatagcggcgtctttgccgctctgaatctcaacctgacgcctagtctcttttatagtagtcggcaggaagattacgatggcgtcgccctcattattggcaatactgcgctatctaccttttctagtcgtttgatgaacgttaacgaattaaccgacatgccagtccgtgaaactaaaattgcgggcattcctctgaccgttcggctttatgcagatgactggacatggaacgatgtgtggtacgcatttttactgggcggcatgagtggaactgtcgttggcctgctctgctattacctgatgagcgtacgtatgcgccccggcagagaaatcatgaccgccatcaagcgcgaacaattttacgtggcgtatcaaccggtggtggatacacaagctttgcgagtaacgggcctggaagtactgctacgctggcggcatcctgtcgcgggagaaattcccccggatgccttcattaactttgccgaaagccaaaagatgattgtgccgctgactcagcacctgtttgagttaattgcccgcgatgccgcagaattagaaaaagtgctgccggtaggcgtcaaatttggtattaacattgcgccggaccatctgcacagcgaaagctttaaagcagatatccagaaactgctcacttccctgcccgcacaccatttccagattgtgctggaaattaccgagcgcgatatgttgaaagagcaagaagccacacaactcttcgcctggctgcacagcgtcggcgtagaaattgctattgatgacttcggcaccgggcacagcgcgcttatctatcttgagcgttttacgctcgattatctgaaaattgaccgtggatttatcaacgccatcggtacggaaacgatcacttcccccgtacttgacgcggtgctgacgctggcgaaacgcctcaatatgctgacggttgctgaaggggtcgaaacgccggaacaggcgcgatggctaagcgaacgcggcgttaatttcatgcaaggctactggattagccgcccgttaccgctggacgattttgttcgctggctaaagaaaccgtatacgccgcagtggtaaggtgtgcttacgtcccttattattcatagtgaaagcatgccggattgcggctaatgatgagtaaaaggaaatccgttgcagatgattgtgcgcatactgctgctgtttatcgctctgttcacctttggtgtgcaggcgcaggctatcaaggaaagctatgcctttgccgtgctgggcgaaccccggtacgcgtttaatttcaaccattttgattatgtgaaccccgccgcgccaaaaggtgggcagataacgttgagtgccctcggcaccttcgataatttcaaccgctatgcactgcgcggcaacccgggcgcacgcaccgagcagctgtacgacacgctatttacgacttccgatgacgaaccaggcagttattacccgctgattgctgaaagcgcacgctatgctgacgattattcctgggtggaggtcgctattaatccgcgcgcccgttttcatgatggtagccccattactgcccgcgatgtagagtttacttttcaaaaatttatgaccgaaggcgtgccgcaatttcgtctggtctacaaaggcaccaccgtcaaagccattgcaccgttaaccgtgcgcattgagttagctaaacccggtaaagaagatatgctgagtctgtttagcctgccggtatttccagaaaagtactggaaggatcacaaacttagcgacccgctcgccacgcctccgcttgccagtggtccgtaccgcgttacgtcctggaaaatggggcaaaatattgtctattcccgtgtgaaagattactgggcagcaaacttaccggtaaaccgtggacgctggaatttcgacaccattcgctacgattattacctcgatgataatgtcgcctttgaagcgtttaaagcaggtgcctttgatttgcgtatggaaaacgacgccaaaaactgggccacgcgttataccggtaaaaatttcgataaaaaatacatcatcaaagatgagcaaaagaacgaaagtgcccaggatacgcgttggctggcgtttaatatccaacgtccggtattcagcgatcgccgggtccgggaagctatcactctcgcctttgactttgaatggatgaacaaggcgttgttttacaatgcctggagtcgcacgaacagttattttcagaataccgaatacgcggccagaaattaccccgacgccgcggagctggtgcttctggcaccaatgaaaaaagatctaccgagtgaagtcttcacacaaatctaccagccgccggtatccaaaggcgatggctacgatcgtgacaacctgttaaaagccgacaaacttctcaacgaagcgggctgggtgctgaagggtcagcaacgcgttaatgccacaacgggtcagccactcagctttgaattattgcttcccgcaagcagcaatagtcagtgggtattgccgttccagcacagcctgcaacggctgggtatcaacatggacattcgcaaggtggataacagccaaatcactaaccgcatgcgcagtcgcgactatgacatgatgccgcgcgtatggcgggcgatgccgtggcccagttccgatttacagatttcctggagtagcgaatatatcaattccacttataatgcccccggcgtgcaaagcccggttatcgacagcctgatcaaccaaattattgccgcgcagggaaataaagaaaaattactgccgttggggcgagcactggatcgcgtattaacgtggaattattacatgctgccaatgtggtacatggcggaagaccgtctcgcctggtgggataaattctcccagccggccgtgcgccccatctatagcctcggtatcgatacctggtggtatgacgtcaataaagcggccaaactgccgtccgccagcaaacagggagagtaaatgggcgcttacctgattcgccgtctgttgctggtgatcccaacattatgggcgattatcaccatcaactttttcatcgtgcaaattgcgcctggcggtccggtcgaccaggccatcgccgccattgagtttggtaatgccggagtattacccggcgcaggcggtgaaggtgttcgtgccagccatgcgcaaacgggtgtcggcaatatcagcgacagtaattaccgtggcggacgcggattagatccagaagtgatcgctgagatcactcatcgctacggttttgataagccgatccacgaacgttacttcaaaatgctctgggactacatccgctttgattttggcgatagcctgtttcgcagcgccagcgtgctgacgctgattaaagacagtctgccggtttccatcaccctcggattgtggagcacgctgattatctatctggtgagcattccgttaggcattcgcaaagctgtttataatgggagccgctttgacgtctggagtagcgcatttatcatcatcggctacgccattccggcctttttgtttgccatcctgctgattgtcttcttcgcgggcggcagctatttcgacctgttccctctacgcggcctggtttccgctaactttgatagcctgccgtggtatcagaaaatcaccgattatctgtggcatatcacgctgccggtgctggcgacagtgattggtggctttgcggcgctgaccatgctgacaaaaaacagtttccttgatgaagtgcgcaagcaatacgtggtgaccgcgcgtgcgaaaggggtaagtgaaaaaaatattctctggaaacatgtgttccgcaacgccatgctgctggtgattgccggttttccggcgacgtttatcagcatgttttttaccggcagcctgctgattgaggtgatgtttagtctcaatggtctgggcttactgggctacgaagcgaccgtcagccgcgattatcctgtaatgtttggtaccttgtatattttcaccctgattggcctgctgctgaatattgtcagtgatatcagctatacgctggttgatccgcgtattgattttgagggacgttaatgagccgactcagccccgtcaatcaggcccgttgggcgcgttttcgtcataaccgtcgcggctactggagcttatggattttcctcgtcttgtttggtttgagtttgtgttctgaacttatcgccaacgataaaccgttgctggtgcgttatgacggcagttggtatttcccgttattgaaaaactacagcgaaagcgattttggcggcccgctggcaagtcaggctgattatcaggacccgtggctgaaacaacggctggaaaataacggctgggtactgtgggcaccgattcgctttggtgctaccagtatcaactttgctaccaataagcccttcccttctccaccctcccggcaaaactggctgggaacggatgccaacggcggcgatgtgctggcacgcattctctatggcacgcggatcagcgttctgtttggcctgatgctgactctctgttccagcgtgatgggcgtgctggcgggggcgctacaaggctattacggcggtaaagtcgatctctggggacaacgctttattgaagtatggagcgggatgccgacgctgtttttgattattttactttccagcgtcgtacagcctaacttctggtggctgctggcaattactgtcttgtttggctggatgagtctggtcggcgtggtgcgggcggagtttttacgtactcgtaatttcgactacattcgtgcggcacaggcgcttggcgtcagcgatcgcagtatcatcctgcgtcatatgttgcctaatgccatggtcgcgaccctcacctttttaccgtttattttatgtagtagcataaccaccctgaccagcctcgatttcctcggcttcggtctaccgctcggtagtccgagtctcggtgaactgctgttacaagggaaaaataaccttcaggccccgtggcttgggatcaccgccttcttgagcgtggcgatattattgtctttgctgatctttattggtgaagccgtccgcgacgcatttgatcctaataaggcggtgtaacatgacgcaaactctgttagcgattgaaaatttgagcgtgggttttcgccatcagcaaaccgtacgtacagtagtcaatgatgttagtctacagattgaggctggcgaaacgctggcgctggtgggtgagagtggtagtggcaaaagcgttaccgcgctgagtattttacgcctgctcccttccccgccggttgaatatctctccggcgatattcgttttcatggcgaaagcctgcttcacgccagcgatcaaacgttgcgcggtgtacgcggtaataagatcgccatgatttttcaggaaccgatggtgagcttaaatccattgcataccctggaaaaacagctttatgaagtgcttagtctccaccgcgggatgcgtcgggaagcggctcgtggcgaaattcttaactgccttgatcgcgttggtatccgccaggcggcaaaacggctgacagattatccgcatcagctctccggcggcgaacggcagcgggtgatgattgcgatggcgctgttaacgcgaccggaattattaattgccgatgaaccgaccaccgcactggacgtctctgtccaggcgcagattttacagctgttgcgcgaactgcaaggcgagctgaatatgggcatgctgtttattactcataacctcagcattgtcagaaaactggcccaccgcgtggcggtaatgcaaaacggtcgctgtgtcgagcaaaattacgccgctacgctatttgcaagtcccactcatccttacacacaaaagctactcaacagtgaaccgagtggcgatccagtgccgttgccagaacctgccagtacgttgctggatgttgaacagcttcaggttgccttccccattcgcaaagggattttgaagcgcattgtggatcataatgtggtggtgaaaaacatcagttttacgctacgagcgggtgaaacactgggtttagtgggcgagtccggttccgggaaaagtacgacgggactggcgctgctgcgactgattaattctcagggcagcatcatctttgacggtcagccactgcaaaatttaaatcgccgccagctgttacctattcgtcatcgcattcaggtggtatttcaggatccaaactccagcctcaacccacgactcaacgttttgcagattattgaggaaggcttacgggttcaccagccgacgctttctgccgcacaacgcgaacaacaagtgatagccgtgatgcatgaagtgggattagatcctgaaacacgccaccgttatccggcggagttctctggtggtcagcgacaacgtattgcgattgccagggcattaattcttaagcccagcctgatcatacttgatgaaccgacaagtagtctcgacaaaacggtacaggcgcaaatattgacgctattgaaaagtttgcaacaaaagcatcaactggcctatttgtttatcagccacgatttgcacgttgtccgcgcgttatgtcatcaggttatcatactgcgacaaggggaagtagtggaacaaggaccgtgcgcgcgcgtgtttgccacaccgcagcaggagtatacgcgtcagctactggcgttgagctgacgcttaaaaaggattgtagttactaaagggttcggcaattgccacaccaaaatttttcaatcggcatgttgcagcaaactcgtcctggcgatttacaaacaggcacggctcaccttcacactccagcacgctacatggaacttcgatgtcgcttaacgcctggcttagtttatacatcacgctccatgcattatcaccatccgggctaagcaatttaagcgccaccaggctgttgtcaccgcacggtccattttgcggaatcggttcaaccttgctacctgcgaaaccagcagaccagcgatagttctgcggcagtcgatggacgatactgagttgtaaactagtcacttattttccccggaagcacattcacttcacaatttgtttacatcaattttaacacatcatcaacaatccgtctttatacagatcgtaaagattgatgcctcgcctgcgtggcctctatggctctgatttaagtaatatctgcgggcgtggtcacgtttgcggggctatatgtacccgtttctgcgatctaactcaacctttttaactacaatgatgtgactttttacataaattgattttacataaaataaacatatatcgggggaatgatagatttgtggttgacatgcatcaacaaaggaagccttttagcttcctcgttgtgcaatagatcaccgttttttcggccgactggcgtacagacagaagagaatggagctggttgcgcagaatgcaatactccaaatcatcggccatgcagagttaaaggtcgcaagagaaagcaatgcgccaacaattgcccctatgccaaaacggaaggttcctgccaggctagatgccgttcccgccatatggggaaactcatcaagaatgaccgccatcgcattggaactcaccatgctcacgcagcccacaaacgccgcaacgccaaccaccaggctccaaaatcccagccccagcagcgcactgatgaccatccacgctgccataataaattgtatccacaacccgctgcggaacatatttaacgcgccaatgcggcggacgaagcggctgttaaagatggtcatcacgaacagaaaaacaatgtttagcgcaaagtaataaccaaagttttccggcgcgacgtggttaatttcaatataaacaaacggtccggcgcttaagaaactgaacatcccggcaaagctgaaaccactggcaagcatgtagctcaggacacgtttatggcggaacagcgccgcaaagttaccaatagtggtacgaatgtgaaatggctgacgacgctccggtggtaaggtttctttaatcaggaagaaaatcattgcgctagccagaatcgccgctaatgccaggatccagaagatgtaatgccagctcagccacaccagcacccagccgccaactatcggtgccatcagcggtgcaatggttgtcaccagcatgacaaagctcatcatccggctgaactcttctttcgggtaaatatcgcgcatcagggcgttaatgaccacgctggccgcagccgcagccagcccgtggaagaaacgcatcacaatcagctgatcgatggtgtttgccaacgcacacgccaccgcggcggcggcaaacaccagcgtaccgccgagcaccaccggcttacgcccgaagctgtctgccatcggcccgtagattaactgccccaacgcaaagcccagaatataagtactgagggtcatctgcgtactgcccgccggtacgccaaactgcgcactaattaccggtagcgcgggcagatacatatcaatgctcagcggcatcaacatggccagcaggccaaggataaaaacaatagcaaagctgctatgctgtcgggtggtcacaacgggctcctgaaagtcattgaaaagttagacgacgctggcaatttcttcttcagttaacggacgatattcaccgggggctaaatcagcatccagcgtaataccgccaatacgttcacgatgcagctcaaccacgtggttacccacggcggcgaacatgcgtttcacctgatgataacgcccttcgctgatggtcagacgaacctgcgttggggtaatcacttccagcaccgcaggcttagtgagatctttttcgttatgcagctgcacgcctttagcaaattgctctgccgtatcgtcagctacaggactttccagtgtcaccagataggtcttctcgcaatgatggcgcggagaagtaatgcggtggctccactgaccatcatcagtcatcagcaccagaccggtggtatcaatatccaaccgccccgccgcatgcagtttccacgctaccggttcatcaagaaaatagagcaccgttgggtgatcagggtcgtccgtggagcaaacatagccctgaggcttattgagcatgaagtaacgtggaccgtgttgctgcgccagcgggttgccatcgtaagcgacatcatgttcaggaagcagtttgaacgctgcattacggacgatttcgccatcgacggtgacacgattgccgcggatttcacgcccggcaatagcacggctaacgccgagttgctgtgcgataaatttatcaagtcgcatgtgtgtgattttgcctgtaaaaacggaggtcgggcattgacccgaaaatctgaactgttgtctgcccagtatagcggtctaataacatccctcaagggaaaaagatccatggcatactattagcagaataatctacctacgcgagaccatgatttttacacttcgcccatatcagcaagaagccgtggatgccacgctcaaccattttcgtcgtcataaaacccctgccgttatcgtgctgcccaccggcgcaggtaaaagcctggtgatagcggaactggcacggctggctcgtggtcgcgtgctggtgctggcacacgttaaagaactggtggcgcaaaaccatgcaaagtatcaggcgctggggctggaagccgatatttttgccgccgggctaaagcgcaaagagagccacggtaaagtggtatttggcagcgtgcagtctgtcgcccgtaatcttgatgcctttcagggtgaatttagcctgttgattgtcgatgaatgtcaccgtattggtgacgatgaagagagccagtatcagcaaatcctcactcacctgacaaaagtgaatccccacttacgcctgctggggctgactgccacgccttttcgattgggcaaaggctggatctaccagtttcattatcacggcatggtacgcggcgatgagaaagcccttttccgtgactgcatttatgagctgccgctgcgttatatgattaaacacggctatctgacgccgccagaacgactggatatgccagtagtgcaatacgatttcagccgcttgcaggcacagagtaacgggctgttcagcgaagccgatctcaaccgtgagctgaaaaaacaacaacgtattaccccgcacatcatcagccagattatggagtttgctgcaacgcgcaaaggggtgatgatttttgccgcgacggttgaacacgcaaaagagattgtgggattactgcctgccgaagatgcagcactgattactggcgacacccccggcgctgagcgcgatgtgttaattgaaaattttaaagcccagcgttttcgctatctggtcaacgtcgcggtactgaccaccggatttgacgccccgcacgtcgatcttatcgccattctgcgccctaccgaaagtgtgagtctttaccaacaaattgtcgggcgcggtctgcgtctcgctccgggcaagactgattgcttaattcttgattatgcgggtaatcctcacgatctctacgcgccggaagttggtacaccaaaaggcaaaagtgacaacgttccggtacaggttttctgccctgcctgcggttttgccaacaccttttgggggaaaacgaccgccgacgggacattgattgaacactttggtcgtcgctgtcagggatggtttgaagatgacgacggtcatcgcgaacaatgtgacttccgtttccgttttaaaaattgcccgcaatgtaacgcggaaaacgatattgccgcccgccgctgccgcgaatgtgacaccgtactggttgatccggacgatatgttaaaagcggcgctacgactgaaagacgcgctggtattacgctgtagcggcatgtctttgcaacatgggcacgacgagaaaggcgaatggttgaaaatcacctattacgatgaagacggcgcggatgtgagtgagcgtttccgtctgcaaacacctgcccagcgtaccgccttcgagcagctttttatccgcccgcatacgcgcacaccgggcatcccgctgcgctggatcaccgccgccgatatcctcgcccagcaagccttattgcgacacccggattttgtcgtcgcccgcatgaaaggccagtactggcaggtgcgtgaaaaagtgttcgattacgaaggtcgttttcgtctggcgcacgaattacgcggttaatggtagttttgattgatgtataaggcgattgagtatagaatctcgcccgcttttgcatacgcaaagcagatcacttacctgttgctgggtcgcctgtagcaggattaatttaagagagaaagaaatgtttactatcaacgcagaagtacgtaaagagcagggtaagggtgcgagccgccgcctgcgtgccgctaacaagttcccggcaatcatctacggtggcaaagaagcgccgctggctatcgagctggatcacgacaaagtcatgaacatgcaagctaaagctgaattctacagcgaagttctgaccatcgttgttgacggtaaagaaatcaaagttaaagctcaggacgtacagcgtcacccgtacaaaccgaagctgcagcacatcgacttcgttcgcgcttaattgctgaataagttgtaaaaaaccccgctccggcggggttttttgtatctgcagattatgcctgattacggtattgctattttttgcaggccagataaggcgttcacgccgcatctggcattcagaacacaaaaccgattaattgccgccagacgtccggcgctgcaattggtcgcgcaaattcggcggcgtgcctttaatggtcaaggtatcggttgctggatcccagaagatgcgttcacctaacagcatcgcatcaaagttaatagtcaagccaccgccgctaccggcaaacttcgtcaactgacgcagtgtgctacggtctgccgggaagctctcttccagttcgtagcctttttcagccgcaaactccgtgaagctcacttcgcttacgcctgccagctctttgctcaggcttttcagttcgatctcttcgcctgcctgcagctgctcattacagtagctataaacctgctggcgcacgttctgtcgctctgctttatccagttgtgcttcggcagtgaaatcatcaaccgcttgcaacagcccacggttttgcgctttcgcgtttaacccttcgctggccccgaggaaatccataaagaaatccgccactttgcgccctactcgccctttcaggaaagtgagatagcgggtggactctggattggtttcccattcggttaaatcgatacgcgcaacaatatccgcatgattgatatcaagataatgggttgggttgatgtcgagattttcgttaacgcgcatactgctcaggttgctcagaactgccaccagcaaatactccaccgccagatagcgatagtggcaaaacagcacgaatccaccgtcagcaaaaggatatttcgctaattcgtcacgcaggcggccggttgccgcgcggctaaatgccaggaagtcctcttcgccctgacgctgtaagcgcagcgtctgcgccagttcactctcttcgctaaacaagccgtaagctttatttttggcgctatagacccgatgcagttctgccaccatctcaacgacggtttctgtcggttccagcaaactatcgcgcaacaccagctcaaggttctgctcatcacgcttgataagctggtgcagagcaatctggttgatatccagactcatgataaactctcctttaagaccgggcggtattcaaccaccgccggttaagcgacgcaataaaagatggcggtcattttacagaaggcagcgtaacgagaatgatttaacgcataaaaaagcagaaaaaaaaccgttgctacggtaatatgttgccctttcatcaactaactgatttcgatttatgccacaaatttcccgctacagtgatgaacaggttgaacaattgctcgcagagctgctcaacgtactggaaaaacataaggctccgaccgacctttccctgatggtgttaggcaacatggtcactaaccttatcaacaccagcattgccccggcccaacgccaggcaattgccaactcttttgcccgcgccttacagtcctctatcaacgaagacaaagcgcactaagggaaacagataacaggttatggtaactcatcgtcagcgctaccgtgaaaaagtctcccagatggtcagttgggggcactggtttgcactgttcaatattctgcttagcctcgtcattggcagccgttacctgtttatcgccgactggccgacaacgcttgctggtcgcatttattcctacgtaagcattatcggccatttcagcttcctggtgttcgccacctacttgctgatcctcttcccgctgacctttatcgtcggctcccagaggctgatgaggtttttgtccgtcattctggcaacggcgggaatgacgctattactgatcgatagcgaagtctttactcgtttccatctccatcttaatcccatcgtctggcaactggttatcaacccagacgaaaatgagatggcgcgcgactggcagctgatgttcatcagcgtgccggttattttattgcttgaactggtgtttgcgacgtggagctggcaaaagctgcgcagcctgacgcgtcgtcgacgcttcgcgcgcccgctggccgcattcttatttatcgcctttatcgccagccatgtggtgtatatctgggccgatgccaacttctatcgcccgatcaccatgcagcgcgctaacctgccgcttagctacccgatgacggcgcgacgttttcttgagaagcatggtctgcttgatgcgcaggagtatcaacgccgtcttattgagcaaggtaatccagacgccgtttccgttcagtatccgttaagcgaactgcgctatcgcgatatgggcaccgggcagaatgtgctgttgattactgtcgatggcctgaactacagtcgcttcgagaagcagatgcctgcgctggcaggttttgctgagcaaaatattagcttcacgcgccatatgagctccggcaacactacagacaacggcatctttggcctgttctatggcatcagcccgagctatatggacggcattctgagcacccgtacgcctgcggcattaattactgcgcttaatcagcaaggctatcagctggggttattcagtagtgatggctttaccagcccgctgtatcgccaggcattgttgagtgatttcagcatgccgagcgtacgcacccaatccgacgagcagaccgccacgcagtggatcaactggctgggacgctacgcacaagaagataaccgctggttcagctgggtttctttcaatggtactaacattgacgacagcaatcagcaggcatttgcacggaaatatagccgggcggcaggcaatgtcgatgaccagatcaaccgcgtgctcaatgcactgcgtgattctggcaaactggacaatacggtggtgattatcactgccggtcggggtattccactgagcgaagaggaagaaacctttgactggtcccacggtcatctgcaggtgccattagtgattcactggccaggcacgccggcgcagcgtattaatgctctgactgatcataccgatctgatgacgacgctgatgcaacgcctgctacatgtcagcacacctgccagcgaatatagccaaggtcaggatttgttcaaccctcaacgccgtcattactgggttaccgcagcggataacgatacgctggcaattaccaccccgaaaaagacgctggtactgaacaataacggtaaataccgcacttacaacttacgtggtgaaagagtgaaagatgaaaaaccacagttaagtttgttattgcaagtgctgacagacgagaagcgttttatcgctaactgattaattataaatcagttagcgaaatatcttacttgcaatcggtgtggaaaacggtagtattagcagccacgagtcggcacgtagcgcagcctggtagcgcaccgtcatggggtgtcgggggtcggaggttcaaatcctctcgtgccgaccaaaaatcccaagaaaaaaccaacccttacggttggtttttttatatctgcaattaattcgataaacagaccgtgacacatcacagcctgtttattttctgttatcagaacgtcctgagctttcatcctatgaaattaattgctgttaaaagcattgggtacagaaaatacccatagctccatacccggagtcagtttttaaaaactgtttaaagaaatgcacaagtattgtgattgattttttagttgtttttcttgatgagaagctgatgcaaaattccgtctttataatgaaaatgatgccaaagcgaacgacaaggttgtagttttcactacatgtccatacataaaatggggtaacattcacgcgcctggtagcgttaccaacgctacgctcaaacataatgattctaataaaacctcaggagactactatgcctgaagcaacaccttttcaggtgatgattgtggatgatcatccacttatgcgacgcggtgttcgtcagttactggagcttgatcctggctctgaagtggtcgccgaagcgggcgacggcgcgagcgctatcgatctggcgaatagactggatatcgacgtgatcttgctggatctcaatatgaaaggtatgagtggcctggatactctcaatgccttgcgcagggatggcgttaccgcgcaaattattatcctgaccgtatccgatgcctccagcgatgtctttgcgctgatagacgcaggcgcagacggttatctgttgaaagacagcgacccggaagtattgctggaagcgattcgtgccggagcgaaaggcagcaaagtctttagcgaacgcgtcaatcagtacttacgtgaacgtgaaatgtttggcgcggaagaagatcccttcagcgtgctgacggagcgcgagctggatgttctgcacgagctggcacaggggctgagtaataaacagattgccagcgtgttgaatatttccgagcagacagtaaaagtacatattcgcaatctgctgcgtaaactcaatgtccgcagtcgcgtggcggccaccattctgttcctgcaacaacgcggggcacaataaaaatagcccgatggatttatcatcgggctgagatttatgacaaacgcaaaactgcctgatgcgctacgcttatcaggcctacgtggatcgatcaatttattgaatttacacaattttgtaggccggataaggcgttcacgccgcatccggcataaactaagcgcactttgtcaacagtctagcccgatggcatcaccatcgggcctctttttatttactctcctgcgggctcaaatgttgcatcgcctgcgcgatactacgttcaatcaccgcacggcgagtatcgttggcaggtaagagtttcaacatcatctcccacgcggcaacggcttcgccaaatcgctgctgctcaaaggcattaaacgcatacatgcttagcacacggatattgctatggtccgttctcaccagctgacgtagcagttcaccgccgaggcggttgtcgttgggatcagaactacgagtcaacgcttcagcgtatcccagtgcagcatcactgtttttcggatcgaggcgatacgcagtggcgtatgcatcggtggcgatactggcgttacccagcgccatgccaacgcggcccaacataatccagccttctatatctcccggatttttttgcagttgagtacgcatccccagcgcaagacggctcatctcttcttcgttgagcggatcggctttcggatccagcgccctgtccagcaacgccggagcctgtgccgtggcctgctgccagattttcacctgctgataattgccagtctggtagtagctgacgccagccacaattaacgccaccacaatacccggcagataaacaacatatccggcacgcttaccttccggcacgctttgttcaggaaacgcttccggcaccacgcgtacccgacgccggctgcgggcgtatatgacccaaccgccaatgccaatagccactactggcagcacccacagcagcacggtcagcggcgttaacggcggatcgtaagtgacgaagttgccgtaacgcgccaccatataatcgacaatctcttttttacttttaccttcctgcatcagttcatacactttctgacgcaggtcggtggcaatcatgctgttggaatcggcaatgctgttgttctggcatttcgggcagcgcagttcttcagtgagctgacggaactgttgttcctgtgcttcatctttaaactgcaacacatcgatggtcgccagcgcactgccggagatcatcagcatcagcacgcccaataaaaacctcattgtgcggcctccttactgtatttctcccacagcggcttgatctcttcttcccagacgcgaggattcagatcgcccgcatggcgatagcgaatgatgccgttgccgtcaataagaaacgtttctggcgcgccatagacaccgagatccagccctaacatgccatcgccatcaaacaggcttagcgcgtaaggattgcccagctctttcagccagctgattgccttctggcgatcgtctttatagttcatgccgaccacgcggatgccctgcgcagaaagctgattcagatattgatgttccgcacggcaggtcggacaccaggtcgcccagacgttaagcagtactggtttgccctgagtcagcacatccgcctgataaaactgccccggattgtccagactttcgagacgaaacttcggcacaggcttgccaatgagcgcgctttccagattggtcggatcatccccttcggcattacgcgccagctgccacagcagcgccgcggcaatcgccaggaagataatcaacggaattaacaatactttgcgcttcatacggcctccggcgcagttttttgcggactcacgcgcttacgatagcgaggatcaaacagacacagcagtccgcccaacgccatcatcagcccgcccgcccaaatccagcgaacaaatggtttgtagtaaagacgcacggcccacgcgccgttttccagctcttcaccgagggccgcgtacaggtcacgcgtgatgccgccgtcaattgccgcttcggtcatcatgctcccggcagtgttgtaataacgtttttccgcatacagcaccgtttccggcttgccatcgcgcgttacgccgatagtcgccacaccgccacgccagttcgggccagtcacctctttgacatcacggaaggtgaagcgatattcatgaatatcgacgctatcgccggacttcatgcgcacatcacgctcaacgctatagttctggctaaaggcaatgccaacaattgtcactgccagcccaaggtgagccgccaccatcccccaataactgaaggtggttttcgtgccgcgactaatacgtagcgcagcttccgcaattgccagcaccgcaatccagcaggccattgccaggccgagcaccgtcatcgccacaactttgctttcgaacagccacggcaacagcaggctcagcaccagcgtagagatgaaggcgataatcaataaattgcggatcttacgcgggcgatcccgcccccagcgcaccagaggaccgacaccaagcagtagcgcaaacggcaccatcagccaggtaaacatggtgttgaagaacggttcgccaatgctaatactgcccagtcccagttgcttatgcaccaacggcagcagcgtccccagcaacaccaccagcatcgcagcgaccagcaaaacattgttcgctaacagcaaagattcccggctccacagcgcattgtttacgcgactgcgaactttgtgtccacgcgcggcaaacagcagcaggctaccgccaatcaccagcaccataaaggcgaggataaacataccgcgcgccggatcagacgcaaacgcgtgtacgcttaccagcacgccggaacgcacgaggaaagtccccaacagacacaagctgaaggcactgattgccagcagtaatgtccacgctttgaagctggcgcgttgttcagtgaccgccagactgtgcatcagcgcagtccccaccagccacggcataaagctggcgttttctaccggatcccagaaccaccagccaccccagccgagttcgtaataggcccatgcggaaccgagcacgatgccgagcgtcaggaagatccacgctgccagcgtccacggacgagtaaaacgcgcataagtgctgtccagacgcccgctcagcaaagaagcaatggcaaaagcaaacgccacgctgaaacccacgtaccccatataaagcagaggcggatggaagatcagccccggatcctgcaatagcgggttaagatcgcgaccttcaatcgggaagttcggcaacgtgcgagagaacgggttagaggtaaagagaatgaacagcaaaaagccgacactgaccatccccattatcgccagtacacgggccacaatatccagcggaatacgctgactaaaaatcgccaccgcaaaggtccagccgctcatcagcagcacccacagcagtaggctgccttcatgcgcgccccaggtagccgccacgcgataccacaccggaagctgggtattggagttgctggcaacataggtgacggtgaagtcgttgaccacgaaagcattgaccagcaccagaaatgcgccagccacagacataaacagcagccaggcaaacaagcgggaagacgccatcatgcgcgcatctccgcgcgccacgccccatagcggatacacggacagcagcagcgcaattcccagcgccaggcacagcagtccgttaccaatttctggcatcatgatgctgggtccttataaacttacgtcaacttgctgggtccttataaacactcgccgggcgacggtggttagcttccatcgctttctcaacttctggcggcgtatagttttcatcgtgtttcgccagcacttctttcgcgaggatatgattgcctttttccagttcgccctgcaccacaacgccctgcccttcacggaacagatccggcaaaatgccttcgtaagagacatccacactgccttcagcatcgtaaatggtgaaggtcactttcaggctattgggatcgcgctgcacactacccggcatcaccatcccgccaacgcgcagacgctgaccgacttccggcatttgctgagtttcacgcttgccgtagagaatttcccccggcgtataaaagagatcgatattgctgcgcagcgcatatagcaccagaccgatagtcagcgccagccctgccaacacggcacaggcaatccacaagcggtttttacggcgaatattcatgcagcctcctgctgttgcgcagcacgtaaacgcgcctcacgcgcccgctgttgcgccacgccacgcagaattgcgcgatgttgcatcacgctgtgcacgaccaaaaccaccagcggaataacggtcatcaccaccgccagccagacaaaaaaggcgtaaccgcccattgcgaaaaattcattccaggaagcaaatgcaggggtcatttacggcctcttttcagtatcagttcactcacccacggacggcgtttttccatcagcaaaatcaaattacgcatccgcatcagcgtcagcgtggcagacaggagcaggaagccaaaaatgctccagcgcagcgggctacgcatcgccggatcgatactttgctgcatccgcgtacttccctgatgcagggtgttccaccactccacggagtaatgaataatcggcagattcaccacgccaatcagcaccaggatacctgccgcacggcccgccagacggcggtcgtcgaaggcgtgccacagggcaatcacacccacatacaaaaacagcagcaccagttcagaagtcagacgtgcatcccatacccaccaggtgccccacatcggttttccccatgcagagccggtaaccagggcaataaaggtaaacacggcaccaatgggggccatcgccgccaccgccaggttggccattttcatctgccagacaaggccaataaacgctgccactgccatacttgcataaatgcccatgctccagatcgccgcaggcacatgcaggtagataatgcggtagctatttccctgctgataatcagccggagcaaagccgaatccccagatccagccgacggtaagcacgaccacactggcaattgccagccacggtataaaccagccacagatttgatacagccgtggtgggatcgccagttgatgcagtgttttccacatagtttcgataccagactcgaacaaaaatcagtaatccagcgttattgaatgctgattcgtaacgctgccgccgtcgcaaaaggacttaatgtcgcggtgcctgccagcaacgcgcctaaaattgccagatacccgtcaacgggcaaatgcatagaagccgcgtccatcgcggcggtggcaaagatgagtaatgggatagtcagcggtaacaccagtatgctgagcagcacaccaccgcgcttaagtcccactgtcagcgccacgcccggtgcaccgagaaagccaagcgtaggcgttcccagcagcagcgtcagcgccatcacttgccagccataaacatccattcccagtagcattgctaccagtgggctaaggatgagtaacggcagaccggttaccatccagtgcgccatcaccttcgccagcacaacggcgggcaagggtaacggcaacaacatcaattgttcaagactgccgtcctgcaaatcgtcacggaacagtcgttccagcgccagcaaggaactaagcagcgcagcaacccagataatgcccggtgcaatacgcgccagcagttgcggctccggaccgatactgagcggaaaaagggtaattacaatcaggaagaaccacagcgggttggcgatttcggcgctatggcgaaacgctacacgcagctcaagacggaaaatgcgccagaacatcatgcggccctcgtttgcgtcagactaatgcggcgaattttactttcagcaacgttgagcggctggtgggtagtcagaatcacaatccccccctgctccgtatgctgcgccatacgctgggtcagacgatcgacaccgttaacgtcaatcgcggtaaaaggctcgtcgaggatccataacgtggcacgggtcagccacagacgcgctaaagcgacgcggcgttgttgcccggcgctgagctgatttacaggaatatcttcgaatccggcaagcccggcctgcgccagggcttccagacattgtgcggtatcgccatcgcgatgataaaagtgcagattttctaacgccgtcagccgggttttgatccccggctgatggcctatccataacaggttttgatggtagctgtcgcgtacctgatgcaagggctgcccttgccagagaacctcgcctgcgtcagggcgagacaaccccgtcagcaaacggagaagcgttgtcttccccgcgccgttgctaccggtgatttgtacccactctcctgcgttcagcgtaaaactcaagccactaaataaggttcgttcatcccgctcacaaagtaactctctggcttcaagcatacccacgcaataaccctgttaaaaacctggctcgacttcacgcatatcgggcagcttgtgcgctatccctttatggcaatcaatacaggtttgcccatctttcaccgcctggtcatgcatcttcgcggcaacgcttttctgggcggttgtatccatatactcgaagttgtgacagttacggcactcctggctgttattgtccttcatgcgccgccactcattctgtgccatcgtcagacgatgagcttcaaatttctgcggcgtgtcaataacgccaaaaattttaccatacagctctttacttgctttgagcttgcgtatcatcttcggcacaaactcgtgcggaacgtgacaatccggacaggtcgcacggacgccgctacggttgttgtagtgcacggaatccatgtattcctgatacaccgtgttgcgcatttcgtggcagctaatgcagaactcttcggtattggctttttccatcccggtgttaaagccaccccagaagacgatgccgccaacaaaaccgatcaacagcagcgtccccagcgccagacggctgggggtacgccaccatttccacaggcgcttaatcagaccaggcttacggtcagaatttcccataataacctcttatttcccgtaacctttacttggggtaaaggtattccccacgattggcgcggtatcggcctgcggtacgtgacattgcagacagaaataacgacgcggagccacttccgcgcccactttgccgtcgctgtccataaagtgagtaggactgatacgcggcgcgccagtggtgcgatagctttcgacaccgtggcactgcaagcagcgattggtattggtcgttacctgataaccttcaacgctatgcgggatcattggcggctgattcacatagttcagcggcatccgatcctgctcttttggcatccgaatggccccttcctgtgtcccggatacttccgggctctggctaaaatcgacgccattagccgcccaaaccgcgccgcttaccaccagggccagcatcgccgtccattgacacagcgctttcttcaggtcatggcttttcatgatttcgctcccgaactccattatgtcaacttttcgctccgctactccatcgtgtagttattgtaaatacatcctcagaacagacatccacgcagcgaccgcacgtcatgcaatcgcggctggtgacctgcaccgggctttgttcatccagcaccggggcacgtagcacatgcggttccgggcaaacatgaaaacaatccatacagcggttacatttctgccgatcggtggccgcaacggtaatcacacctttgctacccagcacgccatacagcgcgccaaccggacaaatgtgcccgcaccagccgtgttcaacgaccagtagatcaaataaaaacagcgcgagaataagcagcgcgccgctgccgaagcccattaccaggctacgccccatcagagaaacggggttgatccattcccaaatgagcgtgccagttaaggcacttcccaccagaatgaccaccaacagcacgtagcgaatgtggcgagggatcgtcgcagactgattgaggtcaaagcgcctgcgtaaccagttcgctaagtcggtaatcgggttcagcgggcagacccagctgcaaaataatcgctttcccgccagggcgtagagcacggtgataatcaccgcaccggtcaacgccaccgtggcaggcagatgaccactggcaagactttgcagcgtcatcagcggatcggtcagcggaacggtgtcgaataacaggctactgctgtagttgccgtgcaagatccacacaccaaaccatggaccgctcaaaaacatccccagcacgaagaactgacaaaggcgacgtaacaccagccaacggtgactgcgccaccagccttttttctccagcgcctcgcgcccggcgtcacgtttacgatttgccattgttcccctccagccagccgttacttagcttttgccattgttcccctccagccagccgaagcggtaatggtgacctaactcccctttcgccagactcagcggtaacaccttgattgccggttgttccagcacgcatactttttcgcacttaccgcaaccggtacaggcgtcgctgtgaaccgtcggcagaaagcgggcgtgcttaccggtacgcgtgttgcgctccagctccagggtgatggcctcatcaattttcgggcattcgcgataacaaacatcgcagcgcagcccctgaaagttgagacagttttcctggtccaccagtaccgccagccccatccgcgcgtcgtcgatgctttcaatctcacgatccagcgcaccgcttgggcacactttggcgcacggaatgtcctcacacatttcgcaaggaatatcccgtgcgacaaaatatggcgtgcccgcgctcagaccagaggccagcgtcgccagttttaaggtgtcgtaagggcaagcctgaacacactgaccgcaacgcacacaggcactggcaaaggcgttctcgtttatggctccgggcgggcgcaaccgcacgccagatgcgcgtgcggtttgctgttgtaaccccagcgccacacccacggcagccagcccgcctgctgtgcgaacgacatcgcgcagaaagcggcggcgaccattttgaggtttcgcactccgggacataatggcttacaccttctccagtttgaccgcgcacttcttgaagtccgtctctttgctgagcggatcggtcgcatccagcgtcagtttgttaaccaactgtgcggcgtcgaagaacggcatgtacaccaggccctgtggcggacggttacgaccgcgcgtttcaacaatgctgatcacttcgccacggcgagaaaccactttcactttgtcgccacggcgcagatcgcgcgctttcgcatccagcgggtgaataaacaggaccgcttccgggaaggcgcggtgcagttctggtacacggcgagtcatactgccggtgtgccagtgctccagaacgcgtccggtagagagccacaggtcgtactcttcatccggtgcttccgccgccggttcgaatggcagtgcgaagatcaccgctttgccatccggtttaccgtagaacttatagccttcgcccgctttcacgtacgggtcgttaccttcgctgtaacgccactgcgtttctttaccgttcaccaccggccagcgcagaccgcgcgctttgtggtagtcatcgaacggtgccagatcgtgaccgtgaccgcgaccaaaccatgcgtactcttcgaacagccctttttgcagatagaagcccagctcgcgggattcatcgttcagctgatcttccgccagttcggataccgggaatttgctcacttccggtgtggcatacagcacttcgtacagcgttttgccacgcagttccggtttcttcgccagcagatcttccggccatacttcttcagttttgaagcggcgggagaactggactaactgccagagatcgcttttcgcttcgcccggtgcctgtacctgttgacgccagaactgagtacggcgttcggcgttaccgtaagcgccctctttctctacccacattgcggtcggcaggatcaagtcggcggccagcgcactgactgtcggatacggatcggagacgatgatgaagttgcgcggatcgcgccagcccggcatacgctcttcattgatgttcggcccggcctgcatgttgttggtacacatggtccagtaaacattcagtttgccgtctttcagcgcacggtcttgtgccaccgcgtgcagaccgattttcgccggaatggtgccgctcgggatattccacttcttctcgcagatatcacggtgtttctcgttggtcaccaccatgtccgcaggcagacggtgagcaaaggtgcccacttcacgcgcagtaccacacgcagaaggttgcccggtcagggagaacggaccgcaacccggctgggaaattttgccggtcagcaggtgcaggttgtagaccaggttgttagcccacacgccacgagtatgctggttgaagcccatcgtccagtaggagatgactttcttgttcggatcggcatacagctgcgccagttgttctaactggtctttcggcacgccggtcatttcggcagttttttccagcgtatactcggcaacgaaggctttgtaatcttcaaagctcatcggttcggaggcgtcagaacccggattcttcgctgctttttccagcggatgggtcggacgtaaaccgtagccgatgtccgtcgcccctttgcgcaggttaacgtgcttgctgaagaagtcctgatttatcgcattgttttgaatgatatagttggcgatgtagttcaggatcaccaggtcagattgcggcgtaaagatgatgccgttatccgccagctcgaagctacgatgctggtaggtagaaagcaccgccacggtgacgttctggttagagagacgacggttagtgatgcggctccagaggatcgggtgcatttccgccatgtttgcgccccacagcacaaacgcgtcagcctgctcgatgtcgtcatagcagcccatcggctcatccataccaaaggtacgcataaagccaactactgcgctcgccatacagtgacgcgcgttcgggtcgatgttgttgctacggaagcccgctttaaacagcttggacgcggcataaccttcccagatagtccactgaccagaaccgaacataccgatgctttccggccctttttctttcagggcggttttgaatttctcttccatcacatcgaaggcctgatcccaggtgattggggtaaattcgccttctttgtcatatttaccgtttttcatacgcagcagcggctgcgtcaaacggtctttaccgtacatgattttgggcaggaaatagcccttaatgcagttcaggccacggttaaccggtgcgtccgggtcgccctgacaggccaccacacgtccctgctgcgttccgaccagaacgccgcaaccagtaccgcagaaacggcacggcgctttatcccatttgatggcttcctgctgaccaacaacggcgcgggcaacgcccggcacgctgagaccggcagccgccgcagcggccgcaacggcgttagctttcataaagctacgacgactgagtttcatggtgtttcctcaccttgctcttcctgctggtgataaaccaggctcaccgccagcacgccctctacgttgcgtacactctcaatggtttggatcagcgtttcgctgtcttctgcttccaccaccacaatcaactgaccgctcggcgcgtcgctgacagcaacttcacagccgggaaaggcgttcagttgggtgctgatgtcactaattcgttcgcttttggcctgcacgaccaggctgcaaacttgccagttagtgtgcatggagatactccgcagttatggcacttaccggacagctggctgcacatgctccacatccgttgcaaagttggctattaagttgcggctggtagatcccggagagcgtcgggcgaaagataattgccattggctcacagctatcctgacagcggcggcattcaacactctgatacgccaggcacgcgtccccgatggtgaactgcaaatcccaggccctggtgtggcgcggagaaaataggctttcggggcaagcctgcgcgcaggcgtaacagaagctgcactcgttatttttgaaattaacgctcggatagccgcccgcgccgcgttgcagaatgttgttttcacaagcattaatacaggcgtcgcagcgggtgcaatgggtcagaaaatgagattcatcaccggaccagggcggacggataccgttactggctttgcgccagcgaccagtgagtatgccccgacgggatgcatcaatcttcacattgaccttccatcattaacgcgctctgaaaattgagagcgaccaaataaaccgcataattaataagccatttttatagccgctaagatattaaaggatgtgtcaaagatgcataccccgatcggggtaaaacctgtagcaggatcaaaagagtggcgggaagcgtggcaaaaacgggcttttgctcacatttcaaatggttataaatatatttatatagcgattgattcaccagagatatttctgctggtttgctctctcattagaatttaacactaaaagagcaggtaaaattgtctgaatgttctttaagttattcataaagcaaattaataaatctgatgaatatgttaaccttcagcgacatcatcggtgaaaacctataaatgaagaaggaaagcaaaaaaatgaagaccattctacctgcagtattgtttgccgctttcgctaccacttccgcctgggcggcagaaagcgtccagccactggaaaaaatcgcgccttatccacaagctgaaaaagggatgaagcgtcaggtgattcagttaaccccgcaagaagatgaatctaccctgaaagtagaactgttaatcggtcagacgctggaagtcgattgcaatttgcatcgtctcggcgggaagctggaaaacaaaacgctggaaggctggggctatgattattatgtctttgataaagtcagttccccggttagtacgatgatggcctgcccggatggcaagaaagagaagaaatttgtcaccgcgtatctgggcgatgctggaatgctgcgttacaacagcaagctgccgatcgtggtgtatacgccagacaatgtagatgtgaagtaccgcgtctggaaggcggaagagaaaattgacaacgcggtagttcgctaaactgccgtgaagtgcggcaccccgtaggtcagacaaggcggtcacgccgcatccgacatccaacgcccgagccggttgcctgatgcgacgctggcgcgtcttatcaggcctacaccgctgtgaagtgcggcaccccgtaggtcagacaaggcggtcacgccgcatccgacatccaacgcccgagccggttgcctgatgcgacgctggcgcgtcttatcaggcctacaccgctgtgaagtgctccaccccgtaggtcggataaggcggttacgccgcatccgacatctaacgcccaagccggttgcctgatgcgacgctggcgcgtcttatcaggcctacaccgctgtgaagtgctccaccccgtaggttggataaggcggttacgccgcatccgacatccaacgtccgagccggttgcctgatgcgacgctggcgcgtcttatcaggcctacaccgctgtgaagtgctccaccccgtaggtcggataaggcggttacgccgcatccgacatctaacgcccaagccggttgcctgatgcgacgctggcgcgtcttatcaggcctacaccgctgtgaagtgctccaccccgtaggttggataaggcggttacgccgcatccaacatctaacgcccgagccggttgcctgatgcgacgctggcgcgtcttatcagcatacgccacatccggcataccatgccggatgtggcgtatcattacaacgcaatatccgccacttctttttgaacgggttgcggtttcaactgcggtttcggcgtactatctgctgcctgcggcttgtcgtagttcaaccccagcacttcgctggtgtactgcaactcgcgttctgttgccgctacatcaccgttcagcttgcgtccataagacggaacgatcgctttcaacgtagcctgccattgcgggctggaaacacgatcgccaaatactttttccagcagattcaacataatcggcgcggcggtactcgcccctgggcttgcccccaggagcgcggcaatggttccttgctggtcactgacgacttcagtacccagacgcagtacgccacctttctcggcatcacgcttgataatctgcacgcgctgccccgcttgccacaaacgccagtcctcttttttcgcctgcggatagtactctttcaacgcttcaaaacgatcctcttcactcaacatcacctgactcaccagatatttcaccagatcgaaattatccagcccgacgtgcatcatcggcatcacgttagaggtggtggtggaactcattagatcccacaaactaccgtttttgaggaatttggtactgaaggtggcaaatggcccaaacagcactacgcgtttaccgtccagaacgcgggtatcgatatgcggaacgctcatcggtggtgcgccaacggatgctttaccgtaaaccttcgccagatggtgattaaccacgtccgggttttcgctaacaaggaactgtccgcccaccgggaaaccggcgtagtctttcgcttccggaatcccgctttcctgtaacagcttcagcgccgcaccgcccgcgccgataaagacaaatttggcacgaatgttctgtgcagtgccatttttcagatcggcaacggtaacggtccaggtgttatcgtcattacgctttagggcgcggacttcgctgctgagttgcaggctgaagttagatttcttctgcaaggaagcaattaactggcgggtgatctcgccgtagttcacatcggtaccaatttccgtacgcgtggctgccactttctgttgcggatcgcgcccttccatcactaacggtgcccactctttgatctgcgcgtgatcttcagagtaacgcataccgcgaaacaggctgctttgttgcaacgcggcgtaacgggcgcgcaggaaattgacgttatcctcgccccagacaaagctcatatgcggaacggtattgataaaactacgcggagtacgcagcacgccgcgctcaacctggtgcgcccagaactggcgggaaatctgaaatgcttcgttaatggcgactgctttttcaatactgatgctgccatcggcgttttgcggggtgtagttcagttccatcagtgcagaatgcccggttccggcgttattccagccgttgctactctcctgcgcgacaccctccaggcgctccaccatggtcatgctccattcaggctccagctcgcgtaaataggtccccaacgtggcgctcataatgccgccgccaatcaacagtacatcagtttcctgctcctcggacgctttcgcttttgccgccatgctaacggcattaagccccacggccatgctgaagagcatggcagtcacttttttcatcttgttaatgccttacttttagtcgctttattgcaggtgagatttgcgcggcatcaacggtaacacttaagtaacaacatttaaataatgtttataaattatattctaattttagaaacattataatttcgttgattaattatagggttattagaaatgaagggatttttagcatattgacctgacggcagcagtccgccaggtcagcgtcgtaatattatgccgtccgggcaacggcatcacggctagcggcatcgcgctcttcgcccgtcagctcgctaagttgcccattgcgcatttccagcaggcggtcggcgtggataaagtaatgatcatcatgactgatagcgaaaatagttttacccatctcctgcatcagcggcagcaacacctgataaaactcacgacggaagtgtggatcctgatccgccgcccattcatccagcaggataatatcgcgttcttctgccagcgccagcaacagcgccacgcgttttttctgccctttacttaacttcaggttaacaatacgcccgttgcttaactcaagcttatgagccattttcagctgcgccagccacttctcaaccagttgcgggttagcgggtttaccctccggccccagcagttgatcaaacagccagacatcggtaaacactgcgctaaacagtttgcgataatcttccggttgttcgccgctgacaggtttgccatccagcaagatttcgccgctttgtggctgatacaagcccgtcaacaacatcgccagcgtgctttttccgctaccgttgccgccaatcagaaacagcagctcgccacgtttgatggtgagattaatcggaccaacggaaaacgcgttatcctgataagcaaacgtcacgttacgcagctccagcgtttgccagttgggaaacgcctgcgggcgcggaaactctgctttgaaaggcgcgagcgcgaatttgttcagcttgttaaacgccacctgcgccgtcagcagcgtcggcaatgcgccaaccgcgctaagcagcggcgtacgcaggaataaaagcgtcaagctataggtcgcggcaacgttggtatcagcccaaccgaggctgttcgccatccagaacaccaggccgattgcgcccagcatcatgatgttactccagttcacggcactaagatggaaggtgtctgcgcgaataatatggtggcgatactcttgcgcatcaggaatgtagaggttgttaaacacatactcggcgcgttcccggttcagagtcagctctttgcgcccttcaagtacagtttgaaaatccgtgtacagcttgtcttcggtttcacgcagggtcgccatatgtttgtacacccgcgccaccagcacaaaaccgccccagatggtgatcgccatccagatagccgttaccagcaacattttgccgctcagcatccacagatacgccgcactaccgatagtgagaatgatcccctgcaccagttccggcagacgcacaaaagcaatggtgatattgcgcacatcgctggttaaccccgccagcaagctggcgctaccgagttgttcaatgcgctcgacgtgagtatccagaatccgcttgataaattcactacgcagtcggtaaacgaagtgatgccccaaagtggtgagcgccagttggcttccgagagtgactgccatcaacagcagcaataatcccagaaactccggcaacaccagcagactggtatccgccgtttcgataaggcgctgattgataaaagcaattaagccaatgcctaatgccgcactggcgaggcttagcgccatcacactgataaatggccagcgatactgccgccagacaagtacaagaagttccatgcagaaaacccggacaatgaattacagcccgcagtttaaacatcttcgcgcgcacagcaataataattcttatttttattcttttttacctgcctgacggaatgtcaggttgtagcggcagtcgatggtgagtggatgaaaccccgctttcaacggttgaataccgtgataaaacagccggctttcaccgccccataccaccacatcgccatgttccaacaacaaacgtttgagcggatcatttcgtttcaggccgccaaattgaaaaatcgcgggtaagcccagagaaacagaaacaattggcgcgcgcagatccggttcgtctttatcctgatgcaggctcagtttcgcgccaggagcgtagcggttgataagacaagcatctggctggaaatctggatagcccgccgccgtagccgcacgttgacataaattatgaaaactctgtggcatggcgggccacggtttatttgtttgcggatcaatggggctatagagataaccttgccgatgggtcgtccagcccagatgcccacagttggtcatcgccacgctcatggtatatcccccgggggtgaccatctggcgaaacgggctctggctggcaacgtcattaatatcgcggatcagttgctccgcagcgttaaaagcaaaacgccgtaaaattaccgcaccagccgccagtggctcttgccacggttcagcatcggcaaacagatccaacattacctctcctcattttcagcttcgcggcgcagcagttgcgctttacggctcacgccccagcggtaaccggaaagtgtgccatcaccacggaccacccgatgacagggtattatgatagccagcttgttggcggcacaggcgctggcaacggcccgtaccgctttcggtttgccgatggcgttagccagttgctgataactgacggtttcaccgcaaggtatcgtgcgcagtgcctgccagacttgttgctgaaaagcagtgccgcgaatgtccagcggtaacgtcagcggcgtatcgcgttgattgaggctggcgatcacttcacgcacatgttgctgaaacatcagatcggcaggcgcgttgtcggcagcgggaaacatctgctgcaactcgctgattagtgtcgcgtcatcatcgcccagcaatatcgcgcaaatcccccgctcgctttctgccaccaggcaacgacccagctcacaatcagccagcgcgtaacgcaccgccagattttcgccaccgtgacggaattgtttagccgtcatgcccagcgtttcgtcagctttgcgatagtaactgctgctgtcggggaatccggcgttaagaatagacgtcgtcacgctctcccctttcgccaggctttcgcgcaaacggcgagcgcgccaggcctgttgccaggctttaggcgtcattccggtagtcgctttaaacaaccgatgtagatgaaatggactcatcgccacctggtcggctaaggcttccagcgttacaggcgtttcctgttccagcagtcgacacgcgtgggtgattttatccaaccgatgttgctgggcattggctttttctggctgacaacgtttgcaggggcgaaagccagcggcgagtgcctcgctggcatttgcgtagaaggagacgttttcccgcaaagcatgtctggcgcggcaagacggacggcaaaagatgcctgtggtacgcacggcgaaaacgaattcgccgtcggcattcgggtcgcgggctaagacagattgccagcgttgatcgtcagttaagcatgtggcttttttcataatcagctccctggttaaggatagcctttaggctgcccggtcaccatcacgcaaaaaccaacaatcttgcgctttaatttttttcgctgacaaggaagcttttaaactgtggactcatccaggttttaaagctatcgccttctttggtgatcatataaaccgccagcccttcccggcgaacaacctctttagctttctccggcccgagtaccatcaagccagtatcccaggcatcggcttccagcgccgtcggagcaatcaccgtcacggataccagattgtgttcgatgggacgcccggtttgcggatcgataacatgggaaagacgtttgccgtccagttcgtaatagttacggtagctgccagaggtgctaatcccatgaccgttgatatccaccacagcctgaaccgcgttttctttatcggttggtttttgaatcgctacccgccacggcaggccttcaccgttcataccacggctgttcagcgcgccgcccacgctcaccagatagcgggaaatcccttcctgctccatcaagcgtgccaaatgatcggccgcatagccttcgccgacggtggagagatcgacatataaatccggcaggtctttttgcagatattgctgatggctctgattgatgaccgtcaggtgctgtaagccggttttggctttcatcgcatcgatctgttcctggctcggaatttgaaccggctgttgttccgggccaaagccccacagattcaccagcggcccgacggttatatccatcgcgccatcggtcttcgcgccaatgcgcaggctggtggtgacgatatcggccatcgcttcacttaccggccacgggcttaaactttggctgtcgttaaagcgcatcagcgcggaatcttttttataggtgctaagcagctgatcgtcggcgtccagttgggtctgaatcttttctttaagttcggcgctgcgtttggcgtcaatgcccgggatgctggcacgccagaaggtacccatagttttgccttcaagaacggtaacttcagtagcgtgggttttggcgggttgtggtttttgatcgcaaccaacaaagaagagcgcggcagccagcagtgccacgcgggtaaagcttatttccatacgtgattatcctcatgcgaacggtcgcaagagtacaccaaaaaactgagtttgtacgctgaaaacaatgaaaaaagggcccgcaggccctttgttcgatatcaatcgagattagaactggtaaaccagacccagagctacgatgttatcagtgttgatgccagcgtcacgagtgaactggttgtcgtccagcaggttgattttgtagtcaacgtaggtggacatgtttttgttgaagtagtaggtagcaccaacatcaacatatttcaggatatcttcgtcgtcgtagccacgacccaggtttttacctttagactgcaggtaagccagggacggacgcagaccgaagtcgaactggtactgagcaacagcttcgaagttctgtgctttgttcgcccaacccagggaacctacgcgagttgcgttgtaggtctgggtgtactgagcagccaggtagatgttgttagcgtcgtatttcagaccaccagtgtaggtttcagcacggtcgccgttaccgatgtaagcagcggtgttctgagcatcagtacgtttggagctggagatcgcaccaccgataccgaaaccttcgtaatcataagtgatagaaccgccgacgccgtcgccgttttgacgcagtgcgtcacgaccgttgttagttacgccactagtaaagccttcaccagatgggttgccgtttttaccctggtactgaacagcaaagttcaggccgtcaaccagaccgaagaagtcagtgttacggtaggtcgcgaagccgttaccacgctgctgcatgaagttgtcagaaccgtaggtgtcaccaccgaattctggcagtacgtcggtccaggaagttacgtcataaacaacgccgtagttacgaccgtagtcgaaagaacccacatcctggaatttcagacctgcgaatgccacacgggtccaggagttgttttcgttttcagcgctgttgccctggatctgatattcccactggccgtaaccggtcagctggtcagtaacctgagtttcacctttgaagccaagacgcatgtaggtctggtcgccatctacatctttgttgtcagagaaatagtgcaggccgtctactttaccgtacagatctaatttgttgccgtctttgttgtaaacttcagcagcgtttgctgcgcctgctaccagcagagctgggaccaggagggacagtactttaactttcatgttattaaccctctgttatatgcctttatttgcttttttatgccactgcatactgattaaccctcattaatcagtcggcaagtccattctccccaaaaatgcagaataatccaacacgaatatgatactaaaacttttaagatgtttcatttatcgctatagatgtttcaaaatgtaaatgcaagggaactttttaagattattgcggaatggcgaaataagcacctaacatcaagcaataataattcaaggttaaaatcaataacttattcttaagtatttgacagcactgaatgtcaaaacaaaaccttcactcgcaactagaataactcccgctatcatcattaactttatttattaccgtcattcatttctgaatgtctgtttacccctatttcaaccggatgcctcgcattcggttttttttacccttctttacacacttttcattattctgtgctaccacagaaaaactataacgcttgttaactatttcacaaataattaacatccgcataatttccagcaatctttgtttatttgcaattatttttgttgggctttttgtaggttatttgtacagcaaaatggcgcttgtacatctatttcccccaatgcaggatgataaatatcacgggagaatagagaatcatcaatcaggtaagagtctggaatttcacactgtaccctttatactgccctatcacttcgcgaagttttaacaggtcataaacacgaatgcgtcagaaagagacaacggccacgacccgctttagtctcctaccggggagcattacccgcttctttttactgttgatcattgtgttactggtgacgatgggtgtaatggtacaaagcgccgttaacgcctggctgaaagataaaagttaccagattgtcgacattacccatgctatccaaaagcgcgtcgataactggcgttacgtgacctggcagatctacgacaacattgccgcgacgacctccccctcctccggcgaaggtttacaagagacgcgcctgaaacaggatgtctactatctggagaaaccacgccgcaaaacggaagcgttaatctttggctctcacgacaacagtacgcttgagatgactcagcggatgtccacttatctggatacattgtggggcgcagaaaatgtaccgtggagcatgtattacctgaatggtcaggataacagtctggtgctgatcagtaccctaccccttaaagatctcacctccggatttaaagaaagcaccgtcagcgacattgttgatagtcgtcgtgcagagatgttgcaacaggccaacgccctcgatgaacgcgaaagcttttctaacatgcgccgcctggcctggcagaacggtcattactttacattgcgtactacctttaaccagccaggacatctggcaacggtcgtggcttttgatctgccgattaatgatttgatcccaccgggtatgccgctggacagtttccgccttgagccagacgcgacggcaacgggaaacaatgataatgagaaagaagggacggatagcgtcagtatccactttaacagtacgaagattgaaatctccagcgcactcaactctaccgatatgcgcctggtctggcaggttccttatggcaccttattgctggatacgttgcaaaacattctgctgccactgctgctgaacatcggtttgctggcgctggcgttatttggctataccacattccgccatttctccagccgcagtacagaaaacgtccccagcacggcggtcaataacgaattgcgcattttacgggcaatcaatgaagagatagtcagtctgctgccgctcggcctgctggttcacgatcaggaaagcaaccgcactgtcataagtaacaaaattgccgatcatttgctgccgcatttgaatctgcaaaacatcaccaccatggcggaacagcatcaggggattattcaggcgacgatcaataacgagctgtatgagatccgcatgttccgcagccaggtcgcgccgcgcacacaaattttcattattcgcgatcaggatcgcgaagtgctggtaaacaagaaactcaagcaggcgcagcgtctgtatgagaaaaaccagcaggggcggatgatctttatgaaaaacattggcgatgcgctgaaagaacccgcacagtccctggcggagagcgcggctaaactcaacgccccggaaagcaaacaactggcgaatcaggcagatgtgctggtgcggctggttgatgaaatacagttagcgaacatgcttgcggatgatagctggaaaagtgagacggtgctgttctccgtgcaggatttaattgatgaagttgtgcctagtgtgttgcctgccatcaagcgtaaaggtctgcaactgctgattaacaatcatctgaaagcacacgatatgcgccgcggcgatcgcgatgccttacgacgtattttgctgctactgatgcaatatgccgtgaccagtacgcaattgggaaaaatcacccttgaggttgatcaggatgagtcctccgaagaccgcctgacgttccgcattctggacacgggagaaggcgtaagtattcatgaaatggataatttgcacttcccgtttatcaaccagacccaaaacgatcgctatggcaaggcggacccgctggcattctggctgagcgatcaactggcacgtaaactgggcggtcatttaaacatcaaaacgcgggatgggcttggtacacgctactctgtgcatatcaaaatgctcgcagctgacccggaagttgaagaggaagaagagcgtttactggatgatgtctgcgtaatggtggatgttactagcgcagaaattcggaatattgtcactcgccagttagaaaattggggtgcaacctgtatcacacccgatgaaagattaattagtcaagattatgatatctttttaacggataatccgtctaatcttactgcctctggcttgcttttaagcgatgatgagtctggcgtacgggaaattgggcctggtcaattgtgcgtcaacttcaatatgagcaacgctatgcaggaagcggtcttacaattaattgaagtgcaactggcgcaggaagaggtgacagaaagccctctgggcggagatgaaaatgcgcaactccatgccagcggctattatgcgctctttgtagacacagtaccggatgatgttaagaggctgtatactgaagcagcaaccagtgactttgctgcgttagcccaaacggctcatcgtcttaaaggcgtatttgccatgctaaatctggtacccggcaagcagttatgtgaaacgctggaacatctgattcgtgagaaggatgttccaggaatagaaaaatacatcagcgacattgacagttatgtcaagagcttgctgtaacaaggtagcctattacatgaacaatatgaacgtaattattgccgatgaccatccgatagtcttgttcggtattcgcaaaagtcttgagcaaattgagtgggtgaatgttgtcggcgaatttgaagactctacagcactgatcaacaacctgccgaaactggatgcgcatgtgttgattaccgatctctccatgcctggcgataagtacggcgatggcattaccttaatcaagtacatcaagcgccatttcccaagcctgagcatcattgttctgactatgaacaacaacccggcgattcttagtgcggtattggatctggatatcgaagggatcgtgctgaaacaaggtgcaccgaccgatctgccgaaagctctcgccgcgctgcagaaagggaagaaatttaccccggaaagcgtttctcgcctgttggaaaaaatcagtgctggtggttacggtgacaagcgtctcagcccaaaagagagtgaagttctgcgcctgtttgcggaaggcttcctggtgaccgagatcgctaaaaagctgaaccgcagtattaaaaccatcagtagccagaagaaatctgcgatgatgaagctgggtgtcgagaacgatatcgccctgctgaattatctctctagtgtgaccttaagtccggcagataaagactaatcacctgtaggccagataagacgcgttagtgtcttatctggcatttgcaccgattgccggatgcggcgtaaacgccttatccggcctacgattcccattatttcaacaaattacattaaagtaggccagataagacgcgtcagcgtcgcatctggcatttgcactgaatgccggatgcggcgtaaacgccttatccgtcttagctatcccggcttttcctgaccctctcggcatataacgtcagcgtctgttttatcacatccagcgttaccggcttgctcaggcagctgtccataccggactccagacaccgctgtttctcttcagccaacgcattagcagttactccgattaccggcaacgtcagtcccaactgacgaatgcgttgcgtcaagcggtaaccatccatatttggcatgttgacgtcgctaagcacgatatcaatatgattcttgctaagtacattaagcgcatcgacgccatcattcgcggttttacattgatagcccaagcttcccaactgatctgccagcaaacgccggttaatcggatgatcatccacgaccagaatcatcatatcgtcattatcgctgaccgctttgtccgtactcggcagagcgttagcaggatcgtcgctctccatctcgatcaaataaatacgcgccaacaatgccggtagctcatgcggagcagccacactgtgtacccactcccctggcgctttctccagcggaataccaatatggcgacgacagaaggtcactaccgctctgccctgccattttttactcactacctcgtcagtgatcaacacatcttcgggagtcggttcctgcccttcgtatgttgtaacgacgatgccgctgcgctgcaaactggtttccaggaactgacagaggctcgcattgcggaccgccagccagcagcgtttaccactcaacccttccacgccttttttctgcgggtactgagcgccgtacaacggaatacgcacggtaaactggctgcccattcccggttcactatctacgctgatatcgccgtccatcatgctgatcagtttttcacaaatcgccagacccagaccggtcccctggaaattacgctgtacgcccgttccgacctggaagaagggatcaaacaagcgcaccacttctttcgccggtatccccacgccggtatcgcgaacacggatagagagataatcgccatccgcgcgaacatgcaaaactatacagccggtatcggtgaattttatggcgttactcaacaggttggagatgacctgctgtaaacgcatcgggtcgccatttaaggccactggcacatccggttcaataaagcagtacaagcctaactgcttgcgtaccaccagcggtaaatagttggcggtgatgtggttcatcacttcacgcggactaaactcacgcggttcgatcttcaactgttcgctttcaatcttgctgaaatcgagaatatcgctgataattttcaacaacaggctggaagagttgttcattgccgtcaccagccgatcgacgcctttcggtaactctttggtttgcaacagatccaggttaccgataatgccatacagcggcgttcgcagctcatgactgacggtggcaaggaacatgcttttactctggctcgcctgttccgctgcttgtgccatctcctgcaagctctcttccatcttcacgcggctagaaacatccaccagcacacaaatggccacgttttcattacgatagcggctatggacgaagctgatttgcagattggtattgttgctggtcaggacatcaacaaaattgacctgctgcccacagataatttgcgtcagtcgttggcggtcctcatgcgtaagcatattgagataggtatgcgccagttcgttacttaaaatattgacgccatcagcggtacgcaaaatgcagatacccactggcgcggaggcgacaatcttgcgattgaactgctcatgttcttccagtcgcagggcgtcgctttccgccggaatgaaaatacgtcgctcgtacatccgtgcgagagtaaacaatgcagctccggcaagcacattcagcaaaattgcgttaaggatcaacatgcgaatgcgttccagcaccttatcaaccggcacgctatacacgatgcttaggctactgggtggcagatttttcttcagcaccagctcccggaacccttccgtatagccaaaccaggagcgttcctgcatccagcgaggatcgcccttaattttactttctggtccggtaaggctaatcagggtatgaccattttcatcaagaatggtaacccccatcggcaacgtacccggtaagaaaaagttctccatccggatggtctgctcgacacccaaaagcgcctgcaaccggttcgccagataaactggcgtcaacgcgtaaaaatacccgacgccagggcgcggaccttcgctgatccagtagaggttactgccgctatcatcttgtggtgcatttcgatatttattgatgcgttcatgcaaagctttcaacgcggtatcgcgttccactggcatatcacgcagaccgaaattggccatgcagaggttatcgctgccgattaaaaatacccggtttagatcgtaagccgcagaaaaattatcgcgccagtagcgcataaaccacgccaaactctccagagaacctcgccaggtgttactcattgcggaacaatcggagtcggcaaacagcggttcaaacgcaggcacatccgcctgcgtttctcgtccacgcggggaaagcacaccgttttctgcgcttaagcgattttcggcgatgtacttcagctctttcatcacatcagaggtgcgttgaataaagcgctgagcctgatcggaactcagattaaattcctgacgaatttcgctttctcgctgatgtaacgcattaacgatgtaaaaaacggaactaaaagcaatcaacagccagagcactaacgccaatgctctgaacatgtagcggctggctttcagggttgtacgaaaagaagcaaggtatttcaaaggggcgaagctccgcctcaggtgaccgatggagtgtggttaaggtagcggtaaaagcgtgttaccgcaatgttctctcttctctggaatatgatacaccgccgagaaatcatcaccttaacctctgataatcgtcatataccggacaagactagtggatttcagcatgcattatatgaagtggatttatccacgccgcttacgcaatcaaatgatcctgatggcaatcctgatggtcattgtcccaacgcttactattggttatatcgtagaaacggaaggacgtagtgcagtcttatctgaaaaagagaaaaaactttctgccgtggtcaacctgcttaatcaggcactaggcgatcgctatgatctctacatcgacttaccacgtgaggagcgtatccgcgcattaaatgcagaacttgcccccattaccgaaaatatcactcacgccttccctggcatcggtgctggttattacaacaaaatgctggatgcgataatcacctacgcgcctagtgcgctatatcagaataatgtcggcgttaccattgccgcagatcaccctggtcgcgaagtgatgcgtacaaatacccctttagtttatagtggcaggcaggtgcgcggcgatattttgaatagtatgctccccattgagcgtaatggtgaaatcctcggctatatctgggccaatgaattaaccgaagatattcgccgccaggcctggaaaatggatgtgaggattatcattgtgctcaccgctggtttgctgataagcctgctgttgattgtccttttctcccgtcgcctgagcgccaatattgatatcatcaccgatggcctcagcactctggcacaaaatattcccactcgattaccacaattgcccggtgaaatggggcaaatcagtcagagtgttaataacctcgcccaggcactgcgtgaaacgcggacacttaacgatctgattattgaaaacgctgccgatggcgtcattgccattgaccgccagggtgatgtaaccaccatgaacccagcagcagaagttatcactggctatcaacgccatgaactggtagggcagccttactccatgttgttcgacaatactcagttctacagtccagtactggatacgctggaacatggcaccgaacatgtggcgctggagatcagttttccaggtcgtgaccgcaccattgaactcagtgtcactaccagtcgtattcataacacgcacggtgaaatgataggtgctttggtgattttctctgatttaactgcccgcaaagaaacccagcgccgcatggcgcaagcagaacgcctcgccacactgggtgagctgatggctggcgtcgcgcatgaagtacgtaatccgttaacggctattcgtggttatgtacagatcttgcgccaacaaaccagtgacccaatacatcaggaatatctgtccgtagtactcaaagaaatcgatagtattaacaaagttattcagcaattgctcgaatttagtcgtccacgccacagtcaatggcaacaagtcagcctcaatgcattggttgaagaaactctggtactggtacaaaccgccggcgtacaagcgcgggtcgacttcataagcgaactggataatgaattaagcccgattaacgccgatcgtgaactgctcaaacaggtactactgaatatcctgatcaatgccgtccaggctatcagcgcacgagggaaaattcgcattcaaacctggcaatacagcgacagtcaacaggccattagcatagaggacaacggctgtggcattgatctcagcctgcaaaaaaagatcttcgatccctttttcaccaccaaagccagtggaaccgggcttggtctggcgttaagtcaacgcatcattaatgcccatcagggtgatattcgcgtcgccagtttgccgggctacggcgcaaccttcacgcttattttaccgatcaacccgcagggaaatcagactgtatgactgctattaatcgcatccttattgtggatgatgaagataatgttcgccgtatgctgagcaccgcttttgcactacaaggattcgaaacacattgtgcgaacaacggacgcacagcattacacctgtttgccgatattcaccctgatgtggtgttgatggatatccgcatgccagagatggacggcatcaaggcactaaaggagatgcgcagccatgagacccggacacccgttattctgatgacggcctatgcggaagtggaaaccgccgtcgaagcgctacgctgcggagccttcgactatgttattaaaccgtttgatctcgatgagttgaatttaatcgttcagcgcgctttacaactccagagtatgaaaaaagagatccgtcatctgcaccaggcactgagcaccagctggcaatgggggcacattctcaccaacagcccggcgatgatggacatctgcaaagacaccgccaaaattgccctttctcaggccagcgtcttgattagcggtgaaagcggcaccgggaaagagttgattgccagagcgattcactacaatagccggcgggcaaaggggccgttcattaaagtcaactgcgcggcgctgccggaaagcttgctcgaaagtgaactgtttggtcatgaaaaaggtgcatttactggtgcacaaaccttgcgtcagggattatttgaacgagccaacgaaggtactctgctcctcgacgaaattggcgaaatgccgctggtactacaagccaaattactacgcattctacaggaacgggaatttgaacggattggcggccatcagaccataaaagttgatatccgcatcattgctgccaccaaccgcgacttgcaggcaatggtaaaagaaggcaccttccgtgaagatctcttttatcgccttaacgttattcatttaatactgccgcctctgcgcgatcgccgggaagatatttccctgttagctaatcactttttgcaaaaattcagtagtgagaatcagcgcgatattatcgacatcgatccgatggcaatgagtctgcttaccgcctggagttggccgggaaatattcgagagctttccaacgttattgaacgcgccgtcgtgatgaatagtggcccgatcattttttctgaggatcttccgccacagattcgtcagccagtctgtaatgctggcgaggtaaaaacagcccctgtcggtgagcgtaatttaaaagaggaaattaaacgcgtcgaaaaacgcatcattatggaagtgctggaacaacaagaaggaaaccgaacccgcactgctttaatgctgggcatcagtcgccgtgcattgatgtataaactccaggaatacggtatcgatccggcggatgtataacaccaaaacttgctatgcagaaatttgcacagtgcgcaattttctgcatagccgctcattctccttataaatccccatccaatttatcccttcatattcaattagttaaataactaaatccaataatctcattctggcactccccttgctattgcctgactgtacccacaacggtgtatgcaagagggataaaaaatgaaaacaaaattgatgacattacaagacgccaccggcttctttcgtgacggcatgaccatcatggtgggcggatttatggggattggcactccatcccgcctggttgaagcattactggaatctggtgttcgcgacctgacattgatagccaatgataccgcgtttgttgataccggcatcggtccgctcatcgtcaatggtcgagtccgcaaagtgattgctagtcatatcggcaccaacccggaaacaggtcggcgcatgatatctggtgagatggacgtcgttctggtgccgcaaggtacgctaatcgagcaaattcgctgtggtggagctggacttggtggttttctcaccccaacgggtgtcggcaccgtcgtagaggaaggcaaacagacactgacactcgacggtaaaacctggctgctcgaacgcccactgcgcgccgacctggcgctaattcgcgctcatcgttgcgacacacttggcaacctgacctatcaacttagcgcccgcaactttaaccccctgatagcccttgcggctgatatcacgctggtagagccagatgaactggtcgaaaccggcgagctgcaacctgaccatattgtcacccctggtgccgttatcgaccacatcatcgttagtcaggagagcaaataatggatgcgaaacaacgtattgcgcgccgtgtggcgcaagagcttcgtgatggtgacatcgttaacttagggatcggtttacccacaatggtcgccaattatttaccggagggtattcatatcactctgcaaagcgaaaacggcttcctcggtttaggcccggtcacgacagcgcatccagatctggtgaacgctggcgggcaaccgtgcggtgttttacccggtgcagccatgtttgatagcgccatgagttttgcgctaatccgtggcggtcatattgatgcctgcgtgctcggcggtttgcaagtagacgaagaagcaaacctcgcgaactgggtagtgcctgggaaaatggtgcccggtatgggtggcgcgatggatctggtgaccgggagccgcaaagtgatcatcgccatggaacattgcgccaaagatggtagtgcaaaaattttgcgccgctgcaccatgccactcactgcgcaacatgcggtgcatatgctggttactgaactggctgtctttcgttttattgacggcaaaatgtggctcaccgaaattgccgacgggtgtgatttagccaccgtgcgtgccaaaacagaagctcggtttgaagtcgccgccgatctgaatacgcaacggggtgatttatgattggtcgcataagccgttttatgacgcgttttgtcagccggtggcttcccgatccactgatctttgccatgttgctgacattgctaacattcgtgatcgcgctttggttaacaccacaaacgccgatcagcatggtgaaaatgtggggtgacggtttctggaacttgctggcgtttggtatgcagatggcgcttatcatcgttaccggtcatgcccttgccagctctgctccggtgaaaagtttgctgcgtactgccgcctccgccgcaaagacgcccgtacagggcgtcatgctggtcactttcttcggtagtgtcgcttgtgtcatcaactggggatttggtttggttgtcggcgcaatgtttgcccgtgaagtcgcccggcgagtccccggttctgattatccgttgctcattgcctgcgcctacattggttttctcacctggggtggcggcttctctggaagtatgcctctgttggctgcaacaccgggcaacccggttgagcatatcgccgggctgatcccggtgggcgatactctgttcagtggttttaacattttcatcactgtggcgttgattgtggtgatgccatttatcacccgcatgatgatgccaaaaccgtctgacgtggtgagtatcgatccaaaactactcatggaagaggctgattttcaaaagcagctaccgaaagatgccccaccatccgagcgactggaagaaagccgcattctgacgttgatcatcggcgcactcggtatcgcttaccttgcgatgtacttcagcgaacatggcttcaacatcaccatcaataccgtcaacctgatgtttatgattgcgggtctgctgctacataaaacgccaatggcttatatgcgtgctatcagcgcggcagcacgcagtactgccggtattctggtgcaattccccttctacgctgggatccaactgatgatggagcattccggtctgggcggactcattaccgaattcttcatcaatgttgcgaacaaagacaccttcccggtaatgaccttttttagttctgcactgattaacttcgccgttccgtctggcggcggtcactgggttattcagggacctttcgtgatacccgcagcccaggcgctgggcgctgatctcggtaaaagcgtaatggcgatcgcctacggcgagcaatggatgaacatggcacaaccattctgggcgctgccagcactggcaatcgccggactcggtgtccgcgacatcatgggctactgcatcactgccctgctcttctccggtgtcattttcgtcattggtttaacgctgttctgacggcacccctacaaacagaaggaatataaaatgaaaaattgtgtcatcgtcagtgcggtacgtactgctatcggtagttttaacggtagtctcgcttccaccagcgccatcgacctgggggcgacagtaattaaagccgccattgaacgtgcaaaaatcgatagtcaacacgttgatgaagtgattatgggtaacgtgttacaagccgggctggggcaaaatccggcgcgtcaggcactgttaaaaagcgggctggcagaaacggtgtgcggattcacggtcaataaagtatgtggtagcggtcttaaaagtgtggcgcttgccgcccaggccattcaggcaggtcaggcgcagagcattgtggcggggggtatggaaaatatgagtttagccccctacttactcgatgcaaaagcacgctctggttatcgtcttggagacggacaggtttatgacgtaatcctgcgcgatggcctgatgtgcgccacccatggttatcatatggggattaccgccgaaaacgtggctaaagagtacggaattacccgtgaaatgcaggatgaactggcgctacatagtcagcgtaaagcggcagccgcaattgagtccggtgcttttacagccgaaatcgtcccggtaaatgttgtcactcgaaagaaaaccttcgtcttcagtcaagacgaattcccgaaagcgaatagtacggctgaagcgttaggtgcattgcgcccggccttcgataaagcaggaacagtcaccgctgggaacgcgtctggtattaacgacggtgctgccgctctggtgattatggaagaatctgcggcgctggcagcaggccttacccccctggctcgcattaaaagttatgccagcggtggcgtgccccccgcattgatgggtatggggccagtacctgccacgcaaaaagcgttacaactggcggggctgcaactggcggatattgatctcattgaggctaatgaagcatttgctgcacagttccttgccgttgggaaaaacctgggctttgattctgagaaagtgaatgtcaacggcggggccatcgcgctcgggcatcctatcggtgccagtggtgctcgtattctggtcacactattacatgccatgcaggcacgcgataaaacgctggggctggcaacactgtgcattggcggcggtcagggaattgcgatggtgattgaacggttgaattaatcaataaaaacacccgatagcgaaagttatcgggtgttttcttgaacatcgacggcgaaggtaaccccattaatcaccagtcaaaacttttcaccagcgtcagctcgccagcattacgcatcggtacaataaatgtttcctgtttctcattgacgcttccttcatcggtgatcagcgtcagttgggcggtggttaattccgtttcgctgcgcccaccatagtagttgatatacacctgatagcgcccgtgaattggcgcgggcatggcgaaaatctcgggtccgtaccccgtcgtgacatccatatccagtgcaccactgtttttcagcacggtgttaccgtaccaggcgtgttcgccatcgggcgtaacaacgtgaaggtcgaggtcggtattgtccgtatcccagctgagaaccagccgtaaacgtgcacgaatcgttcctgtacccggcgtactgtaaaactgcattttttgtcggctttgcccatccgggctgatgacctgcacgctgttgctgccttcagtgaaaatataagggcgtgcaaaactaccatcggattcaattctctgcggcatactggcaccgttgaccaccagccggccctgctgaactttacccgccgcagcataattctttattttgccgcggatctgcgcactgatattttgatcatctgccatgttgacggagctcgccgggtaattgatgctttgactaaaactggcatcttcgccctctgccggatgccagccactgagcggtgcatcaatctcgacttcctgcacaccttcactgtgagcgacagggctaagcgccaccagtaacaacggaagaaaaatctttcgcatagcattagtccattaataattgtcgggtcagcgtttcgatatagttctcatcaagcccggtgggataaccatcaaaggccaggtgcagatactcatgggttaaatccagccgatcctgaagcgtaaagaagttacgaataaacagccgtttctgctgccgatcggtataggggaaaccactgactaaacggcaaaccgcaaacacgtctggttcgttgtaccccgtctcagcttgtaatatacgccgccactgcggcatttttttcgccagccaggctttcgctttgggtaataactggcaggtactgcgtggcgctccccagcggctaagactgttgtcgggataagcaaacgcgagtatctgatcgtaacgctctccctgccccgcctgggccgtggcttgccgccaggaaagtgtcccttcggtagcgcgactgccatgataatgaaccggatcgcctgcatagatgagatcctgcgtccaggcggtcatcgttcgcgcccccgtggtcgctgggctagcagaaacacgctgcgtggcgctgctgtcggggatggtcaggcaatcgccttcccgattggcgttttgctgtaaaaaagtgcgaatcgccacggtcatggctttcgctgcctcagggggcgtacttttcgcctcgcgatccagaactctggcaacgtactcttcacgatcgagatggctctgcaatttcagtttgcccttttcgctcagtaaggtcgtctcaccgtggctgacaaacgtaatgtggttaccattagtaaacgtcacacgatagcgcccattaagtacgccgggatttactgccgtcgtactcttttccgctgtgattttcttcagcggatagcgggcaaacagctccacctctacacattgcccactggcaacctgcgtcggcactggcaaaacccgattaagcaccgtcgcataacgggttagtaccgttttgctggtgccactgccagtaacccacagcggtgtaccatcggttaaccagccagcaaaaccaccctgacggatttcctgtttatcatcggcaaaccagctccaggttttcacccgtacccgactaccgagcatggatgcgacaccgattttcgcctcgtccagcaccacatccagtaagacttcctgagctttgttttgcgcgggtaacgtcgctaaactatcaagcaggcttttaaccgttacgctggtttctggcttcagcgtagtcagagacgctaaccacgcaggtgcctgacgctgttgccagtattgcccccacacatctgcgccaatatgcaaccgctgcggcgcaaaatagagcccacaggaacgtaccagcgcggtatcgcgcgttatgctctccccagcctgacaacaataaacctcttccggggagtttccgcgacactggtagggctgctccggttgatgggtatcctccagccaggcgtaaacatacagtttccacaaactccctaacggcgtggtgaggctgtcaggtaatgcactgactttggtcacgccactactgctcagctgatacagttgatcgtgctgcgcaccgcgcagcaccagttgtaacggcgtctcctccgcaagtgttggcagagtaaccaacgccaatagccagacgattcagcgccagttcacttatttcacctgcatcccggtccattcactccctgccgcaacactttgctgcgcaggtgcataggaacgcacataacgagcaggaggcagaacgaattgccctttttgcgagaagcgcagcaaatggcggaaagtgaccgttcccgtcagttctttcaccggcaccatataggccagttcgcccatttcatttcgcgctttttccagcaattgcccctgctgtttcgcggcgttgggtttattgaccgaaatgccccatgttgtgcgctcaacgtcggctcccggtggcagcggtacttccacctgaccgtagcgcagaactgcatcctgctcgctggtaagcgtgatttcatcgagatacagcgcatcgctgtcaatctcattgctggtcaccggttgcagaataaagctcatctcttcttcaccagggataagccgatacaactggcgttcaacggtcaccggaatgttactttgttgagccatttttgccggctcacgtcagcggacctgcacattttgcggcgataattcgtcaccaaaagagagaatgtccggcacgccctgaccaacccaacgccagtcttcgccccctccagttaacttatgtttagcccatgcgcccgcaggcgcaggcaaaacaactggaggcattgtcgccatatatttcgccagccagttcatggccagcgcgcgctcaatagtggattgctcagcggtcaaaccacttaaaatagcggccgtctgggtagcgtcgccaccgctattaagcagcacaaccgtgtgcgccagcggctgattgctgtttgccgctttatcccacgcatattgctgaacctgtggcatcaccgtggacttcaactgcgcttttttcagcaacgtcatggttaagacgtttgccaccgcatctgccagtggagactccggtgtatcgaggatcaggctatcattgatatcgcgggtgtcttcctcagagaaatcttcagttttagttccgcgccgggcgatagcttcatccaaccctttcaacaacgttttgcacggcaaattcatctcctgcgcccatgccagcaccagcgcccgatgcaataacggcatgttatctgcctgctccgcgtagctgtcgagcatatgctgccagtattccggttgttgcgttacgccgatcgcctggctggcctgccagtcggcgtaccatgcccatgccgtaaggaaggcgtcaccattgccatcttcaccccaccaggtaaagcgcgctccgggccccgccagttgcatcagccgcagacggttatcctgaatcatctgacgaatgtcgttagcggcggcactttgatgatcggcaagcgaacgccaggcgagactgagcgggatcagacggctaccggtgttgattacgccaccccacggttcatcgactaacgcatcaagattgttgcggaaaatctcctgcggcgtttcactactttgtagccggatattgctcgcctgctcgggcaacatcagcgcgttatcgccaccaccgagcatgacatttttctgctgttcaacgggccagctgttatccacaaaagacagttttgtgctaatgctgtcctgcacttgcccattttgttgcagttctgcacttaacaagccagattgctgaatattctgcgtcagcgaaatataattcgcccctttgtgcagcgtcagcgtctggcgcatctcagcgcctgcaaatttagtcaccagcgccaccggttcgttatcctgctgactgaagataaatagtcctgccgccggtttgtcgcccacgcgatacaccgttggcatactccacttcatgtagagatttttttccgaacgcagataagcacgcccctgcccgaccagcccgtcgccgttcatcccacgcgcggtgatacgccagcgggttaacgaatcaggcatcaggaacgtgaaatacgctttgccttgtttatcggttgtgagtgacggcatccatgccgcggtatccacctcttcacgccgtggacgttcaagcatttttactcgccgctcgctgcggttagttgcgccaggcgcaaccggctcgctggagagcgcctggtcgtagctgataaacgacagactggagctggtacgcacattgttacgccccagcggatagaaaaatttgccgatattcggcgcgatttctggttgcagcgcgtagatcatttcatcgaccacgcctaccgttagctgcgcagaaacaggtttacctttcagcgacgaggttaattcgacattgaccagttcaccaggctggtaatgggttttgtccgttttcacccggatatccagctggggaacggcaactttgatcccggcgttctgaaaactgtactgaccgttacgggtatacagcaccgaaaaagtgatgttaggcgcaaaggaattgctcactggaacccgggcttcatactgggtatcgtttaaacgttgtagcgttagccagtttgccggatgcgaaagcagcgactgctgttccacgcgatcgcgttccagcgtcaataatgcttcatcaattggctccggaaaggtaatcagcatcttcgcggtttcgcctggctggtacagcgttttatccgccacgatatctaccgtaccagtatgcgccgtgctgcccttaccgctgacggcatgacttaacccagcgagaattaagccgtctttatcgcgtaatgtcagattgtagttgccaggtttagcgaaattgacggtaaaggatttgccgcctgacggtagctctccgctatggctcgtgcggtcttcgagacgcaaccattcatacgtaacaggaacctgttttgaagattccagcgcggcataacggaacacaaccgactcgccgctattactgtattgtgcggcagtacttaatgagtaatgcgccagaccgcgttcaatgaggatctctttggtggtggtgacgcgatacgccgcgccgtcactggcggagacggttaacaaatagcggctcggtttatcggcggcggggagatttaacgccacatgaccgctggcgtcggacaccgtttcgctgccttccagcgacacggggaaacgtccggcataacgcaaatcgttaccgaccattgataattgctgagcgcgcaaacttaactgcacgcgggcattttttaccggctcgccatccgggtagagcagttgcagtttgccgctgaccgcttcgccagttttgaactcttttttggcgagagctaaaccaatctcgaaatgtggcttgatgtagtttgccacgcgaaaactgctgctatagacctgattgcggtaagcaagacgtaactcataacctccggctacgacattttctggcaggcggaaacttccctgcccgccattgcgcgcatccagcgtgacattgacggtttgcaacagactgccgttggcgtccagcaccgaaagcttcgccggggcgctgacgatgggggatgaatgcaacggatcgtggaactcgcggccgatcactttaacatcgacacgatcgcctgcgcgatatagcgggcgatcggtaaaaatatacaagcgggtgttgtagatttcgctttcgtagaagaagttctcggagacaaaaacgccgccttcagcatccttacccagaatgtatgaacgttctggcgatatatgttgtaactgcaaggtaccgctgtcatcggtcacaccgcgggtcatcacgccaagaccgtcagtccacaagatctctgagccgggcttcgcttcaccctgttttttacccgcggtccacaccagaagctctttgcctgacactttgctaagcgccacggtatcggaaacaaacaccaccgtcgtcgcccgatacccaccaaccatcgcctcgacgaggtacagtcccggctcttgttggccgagaggaatataaatgttacccggctgcggcgagatgaaattgctggatgcgccttccagttttaccccttgctgcggctcgaacggtttagcctgccatagtggataacggaactgtttcaccaggggatattttttcagcggggaaaactggttgttctgtacataacgggaaggtttaataatggcattgccgagctgtaattcgggtaacgcctgagtcacattctgccgtgactgagaagagaaagtacgctgcatcacgcggcgagatttgccgtaccagttatcccacagccaggttagcgtattgttcagcccgtcgcccagatattgcggttgcaccacaatgcgatgcaggtttttctgctggcgcaaaaatgccatcgggtcaggaatacgatacaggcgaacgtccacgccgccgtactcttccatctgatagcgccgataatcacgccccggcgcttccagtcgcactttcgcctcttcactgctgctaaaactgctgtcagcaagcaaaaagaatgttcccccggcaggcggcgcatagttgctggaaggaagcgaatcatcagcattagcaagccctgttcccacaagagacagggacaagcacgctgttatcgcgccagaaaatttaaacgataaatgccaatgaaattgggattggaatcgttgggtatccatcgggtgtccttccatgtcataagttgttgcagactgactgcgcgcattccgttgtcagttttcgtggcgcttccggtgtggtagatgacgtaacgccccatccagaccattaagtgctgggcatcgccctgatcgaaaaaaatcatatcgccaggcagcgcctggtttatgtcctggccaataaactggctgttgtactgaatcaaattaatcgcggtcacataggggccggttttcccgttcccctgattccagttttgcgccagttgacgctgttcaggtgttagcgtcatctctggcggcaaatactggctagataaaccgttactttttagccatttactgtcgtgaactttcagcgtctcgttcgccgcaaatcgcaccaggcccgcacaatcctgctgataccagcgtggacttggcccctggcggagctgttcttgtgcaatgcgtacaaaccaggcgcgaaacagcccggattgttcgacattcagcatttcgctatgggcaacaacacaacacagccagcaaatcagcgccagcagcccgtgcctcatagcggctgccaggttatgggtagccactgccaggcggcaccgggttccatctgggccagcttcatgacataacgcggttgttgagataaagcgtccagcttcggcattaataaagtttgtgcggcgttataaaaaaccggttcgagattcttcggcagactggtcaacgtttcgttacgcagcagtttcgctattccttgtggattgatatagagcggaacgatgccatcagtgggtattacatccaccattgccgggcgggttttattcagtgtttgcagcgcgttattaaccagcgtgtcatcgagggagaaaagcagcgttttgttttgcatcgccaggctcacacggaaaaaataatcgctcattaattgatcgggttgcgccgcctgcgctttcggatactggccgtatcgggaactcacttcgcgacgccagatttgcgcttcgccctgctgagtctggcttaccggcaaaacaccttctggcgctttgctttcgtgcgcaccaatattttgcgtaaacagtttccctggcaattgcgcctgttcggcagtgccatcaaactgaccgacaaacagcggggtttgcaatttactgtcttcataccagcacagccccgcggcaccgtctaacgccccattcagcttgtcgttttcctggctgatgtggctaagcatctcttcggcaataccgtgactatacggcaccgccacacagaagctggctccggcaggcatactgttccataccggcgtaaaatcgaaactggcatctacgctggcggattcatcatttaacgccacaaaactgtgccagccgtcgttacccatttcgaagcgtacgccagcaaaagaaggcattaaccgctggtagccaaaccccagccacctggcgctgactacgatgcgctggcgtactggcgttttttcggcagtacgctcttccaggccaaagcttgcttgccagcgttttttgccgctcaacaaatcacctgcgatcgccgtggcttcggtatcctgctgatcatctttaaacaacatatccgtgctggaaaacaccagcatcttgtcctgataagtcgcgaacatcagggcgttattgccgttatagcgcaactgataaacaggaacagtttcactatttatcttgatgctactgatttccgttttgcttaactggctgtcgctggtagcggcaaacaacaatggctccagcagtttgcttaaaccactgcgctggatcagcaccatataatgactaagatggccttgtttatcgtgccacagcgctgcctgcgcgggctgatctaagagactgctaaagagcttatctttcagcgtgagatcgtgttcatagacaatacgacgaatgctgccttcaatgcccagacgatcggcatgattctgataatagaaaacgaaatcttcgctcagaacatcgtggagaaacggaatggtgaggagatctttgggaagctggctcagagagtcgctgtcgagaaagaggtccggctcattgagatcgatttgcagattgttgtgcaccaccagcgggctcaacgttttttctggcccactgccagcatattgcaacgcccagacgccagcggaaagcagtgctattgcgccaaaacctacaagaccatagaaccgccagcctttcgccttttttcaccactcattgccacattccttgtgtatagccagccattttttacgggcacagccaaactttaccgtgccctaatacgacaaaagcccagactttgcagcctggacttttcaattcaaacaagggagatagctcccttttggcatgaagaagtaaaattattcttcttctggctcgtcgtcaacgtccacttccggagcgatttcatcgtccccttccgcggcactgccgtcgatggtatccagatcttcctcgtcaaccggttcagcaacacgttgcagacccactacgttttcatcttccgcagtacggatgaggatcacgccctgggtgttacggcccacgatgctgatttcgctaacgcgagtacgtaccagcgtaccggcatcggtgatcatcatgatctggtcgcagtcatctacctgtaccgcgccaacaactaaaccgttacgttcggtaaccttgatggagataacccctttcgtcgcacggctcttggttgggtattccgccactgcggtacgtttaccgtaaccgttttgcgttgcggtgaggattgcgccatcgccacgaggcacgatcagagagacgactttatcgccttcacctaagcgaataccgcgaacaccggtggtgttgcagcccatcgcacggacagaagactctttaaagcgcaccactttaccttcagcggagaacagcattacttcgtcttcgccgctggtcaggtcaacgccgatcagctcatcgccgtcaaccagtttgatcgccactttaccggcggtacgcagacggttgaactcggtgaggacagttttcttcacggtaccgttagcggtcgccatgaagactttcacgccttcttcaaactcggtcactggcaggatcgcagtgatacgttcgtcctgctccagcggcagcaggttgacgatcggacgaccgcgcgcgccacgagtggcttccggcaactgataaactttcatgctatagacgcgaccacggctggagaagcacagaatatggtcgtgagtgttcgccaccagcagtcggtcgataaagtcttcttctttaatacgtgcggcagatttacctttcccgccacgacgctgcgcttcgtattcagaaagcggctgatacttaacgtagccctggtgagagagcgtcacgaccacatcttcctgggtgatcagatcttccaggttgatgtctgcgctgttggcggtgatttcagtacgacgtttgtcaccgaactgttcacgaaccagctccagctcttcacggatcacttccatcagacgatcggcgctaccaagaatacgcaacagttccgcgatctgatccagcagctctttgtattcgtcgagcagtttttcgtgctcaagaccggtcagtttctgcaaacgcagatccagaatcgcctgagcttgctgttcggtcaggtagtacagaccatcacgcacgccgaactctggctccagccattccggacgcgcagcatcgtcgccagcacgttcgagcatcgcggcaacgttgcccagctgccacggattagcaaccagcgcagttttcgcttctgcaggcgtcggcgcatgacggatcagttcgatgatcgggtcgatgttcgccagcgccacggctaatgcttcaaggatatgagcacgatcgcgagctttacgcagttcgaaaatagtacgacgggtcaccacttcacggcggtgacgaacaaacgccgcgatgatgtctttcaggttcatgatcttcggctgaccatggtgcaatgccaccatgttgataccgaaagaaacctgcaactgggtctgggagtagaggttgttgagcacaacttcaccgaccgcatcgcgtttcacttcaatcacgatgcgcataccgtctttgtcagactcgtcacgcagcgcgctgatgccttccacgcgtttttcttttaccagttccgcaatcttctcgatcaggcgcgctttgtttacctgatacggaatttcgtggacgataatggtttcacgaccggttttggcgtcaacttccacttctgcgcgagcgcggatatacaccttgccgcgaccggtacggtaagcttcttcaataccgcgacgaccgttaatgattgccgccgtcgggaagtccggccccgggatgtgttccatcagcccttcaatgctgatgtcttcatcatcaatatacgccagacaaccgttgatgacttccgtcaggttgtgcggcgggatgttggttgccatacctacggcgataccggaagaaccgttcaccagcaggttaggaattttggttggcatgacgtccggaattttttccgtgccgtcatagttatcaacgaaatcgaccgtctctttttcgagatcggccatcagttcatgggcaattttcgccagacggatttccgtataacgcattgccgccgcagagtcgccgtcgatagaaccgaagttaccctgaccgtctaccagcatataacgcaggctgaatggctgcgccatgcggacgatcgtgtcatagaccgcgctgtcaccatggggatggtatttaccgattacgtcaccaacgacacgggcagattttttataggctttgttccagtcattgcctagtacgttcatggcgtaaagtacgcgacggtgtaccggcttcaggccatctcggacatctggcagcgcacggccaacaatgacgctcatcgcataatccagataggagctcttcagctcttcctcaatgttgaccggtgtaatttctctcgcaaggtcgctcatctaaccgctatccctctactgtatcccggattcaaaggtcgcaaattataacacagccgcgcagtttgaggtaaacctatacgctttattcacatccaatgcctgatatactcgtttgtcttgccaattacggagtagaagtgccaatgaatgccgaaaaaagcccggtaaaccataacgtagaccacgaagagatcgctaaatttgaagccgtcgcctcccgctggtgggatctggaaggtgagttcaaaccgctgcaccgcattaacccgctgcgtctgggctatattgccgagcgtgctggcggtttatttggcaaaaaggtgctcgatgtcggttgtggcggcggcattctggccgagagtatggcgcgcgaaggcgcgacggtgaccggtctggatatgggctttgagccattgcaggtggcaaaactgcacgcactggaaagcggcattcaggtggattacgtgcaggaaaccgtggaagagcacgcggcaaaacatgccgggcagtatgatgtggtgacctgcatggagatgctggagcacgtccccgatccgcagagtgtggtcagagcctgtgcgcaactggtgaaaccaggcggcgatgtctttttcagcacacttaaccgcaacggcaagagttggctgatggcggtggttggtgcggaatatattttgcgcatggtgcccaaaggcacgcatgatgtgaagaagtttattaaaccggcagaattgctgggctgggtggatcagaccagtttaaaagagcggcatatcactgggctgcattacaacccgatcactaatacttttaaactcggccccggcgtggatgtgaactatatgctgcacacgcagaataagtgaggttgatgtttggccgcgccaatgcctgatgcgacgcttgccgcgtcttatcaggcctacaaatgctccccgtaggccggataaggcgtttacgccgcatccggcaaccgtgccgactagacagtgattaccatttcaccgtcatgctcaaaaaccctgccgtctgggcaaaatcatcactccctttctgccacgccacgctgccgcgcagggacactcgctgactgatattgcccgtgactcccacttttatttcaccccgttgcttcaccgcatcgtcactgatagtgctgccatcctcttcaatttccgtgctatggggatcgtgataataattcagatctaatgttggtatgacatgaacagcggtacgccattcgctgtgtaaacccagccgcgtctgaatatcatcaccctggctttgactcacgcgcgcacggttagcggcggtaaaatcatcctgctgcacgccctgataaatcacctgcgcctgcggttcaatcaccacaccacgccccggtaaccactgataccccgcctccaggctggcgataatcccgctgctgtggtaatgatctgtgccatcttcttgttcggaaacatcattgctaaaccacgcgtattgcagccagctatccagccaggccccttgcttctgattaccgtgctgaaaccagctacttgtcagcccaacggcataaccgtggttctggttatcggcgcgagttccggtcatattgctgcggctgtcgccctggttatcgctgtagccaccaacaatcccaagcatccactcgccatccgtgccccagcgcccgctaaacagatcgccgctaagttgcaccgtagaagtgtcttcatgttgagccagttgccccgctgctgtgtaatgataatctccgccgataacacgtaaattcagcgtctgaccatcgccacctgcgtgatcgcgtcgctccatcataaacgcctgatttgccgcccgcaggttattaagataaccgccaactttggcattcaacaccggctggtaagcaggcgtaggttccgggtcgggtgttggatcaggatccggcgtgggatcaggatcgggagtcgggtctggatcaggtgggcttggcggcgttacttcttggcttcgcagataccagtcgttgttatcttccaccagcgtgtagtcatacgctcccatattgacgtagccgctgcctgccagactgaactgcgcattgttttgaaactgcgtgggatcagctgcgaaatcaaccactttaatgcctgtgcttgtcggctcaccaatccctgtaatggagttaaccaccacagttgtgttgccagcagtattaccgttcatcaccaattgatcgcttacgctgtcatcgccgtttaattcgctatcgagcagtagcgtaccgccgccggtataatcaccgtttaccgtcagcgtatcgccagcgacgccattttgcaggctaaccgcaccggacgtattggtcagattgccattaaccgtcacgttggaaagataagtcaggctgtcagtttcaaggttggtattaagctcacctgtcaacgtcacaccatcggtggcattcaccagcgtcccatcgccgttaaatagactggcattaagggcgacggaagtatcctgcccggtcaggcgcaaaaccgtaccatcgctgatgtcgatagtgccgctggaaatagcatcaatactctgaatatcctgatccgcgccagtaacgaacgttgccccatcaccaacccacagactgctagcataaggaaggatatcagcaacatcacctttcagggtgccttcttcgacacgtaccgcgctctgcgttgtaccgctggcggtcagctccagtgtaccagcccccgttttagtcaatgtactaccctcatcctgatgctgcccgctgctgtcagccatcagtgcgccccactgcgtgtctacccccgcatcaactgccacttcaccgtcggcgcgcatttcaatatcacgtccgtggcctgccgcatcactacgcgtgtcaacgtcggaggtaatctccatcacgctttcttgttgcttatcggtaaagataacctggcggttatagtgggtatctccaagctggctgttgtcgctcaccatcagcgtaccggaggcgatttgtgttgtgcccaaataactattattgtttgccagacttacctgcccgtcgctcgcatcgaccaccacgtagacgccatctttcccgtcgccgccgatatgcaaattgtcgccacctgcaagatctaccacatcctgactgccgataaccgttccgctgctgccactgacttcaaggccatcgttgtaacttgtgccgctctgccaggtggagaaatcagagagatcgagcacaccgccgtttaacacgatgctctgcggatcgtcctggagagcggtaagatctgccgcgtcgccttccaggctaagcaccgcaccatcatcaacgactatatcgccggttagcgccatgctctgcgcccctgccagcacgtagctgccgttttgcgcaatggtgagctgaccagcaccttcgatgatgccagcaaaactgccctgattaacagtaacgttgccaccagcatcgatatttaaagtgccattctgaaagcccgtcaatgcgtgcacaaaagtttgttgggtgctgccaacgtttagctcagcctgattctgatactgatcaatactccctatcgtcagaccgtagcagtcttgcggatcgtcctggcaatgcgtatcgccgacattcatcagggagttgctgcggcccagggtaacttcaccgttttcaatctgcatctcaccagtaaagtcattgttatctgcattaagtaccagatcgccggaacctgttttggtgattaacccggtaccagcaatagagtcaacagctccgtcattctctgtattgccaataaccagcgtttttccgtcggcaatatcaaaggtaacttcacttaagccgagatacataaagccacccgccgcagaggaaggaccatctccatagcctgctgcgctattgttctcatcgactaacacgcctccgttctggctgtagctgtcatcaacagaaatatcaataagatagggagccgtcacgctattggtatatatcgccccgccataaccttcggcagtgttatttgtaaaggcagtgttatttactatcgtataaccactaggatgcttgctgtcgctattattatcggtaacatcgattgccccgccatcgccatcactgtaacttgtacttgtatatgcctggttgttatcaaaaataacatcacttaaataaacgtcattattaatggtataaattgcgccacctttgccatcattagcgatgttattgcgaaacatggcgttagtgacacgtaaatcgacggcaccagtatcgttagtaccagaagaatagattgcgccaccatagccgcctgcgacgttaccggaaaaaataacatcagtaagattcagcgtactgttttctttagcaaatatggccccgccgttattatattctcctgtaacggtgttattggcaaacagagtcattccagtttcattttctggtaatagactaaattccgctccttgttgcaaaaatacggccccaccgctggcgttattggtcatatcgctaaaaaccagccattgcccatcagcgatactccagtcctgcgtaatgccactaaggctttgcctgctggcctgacaactcgctttgacatcatatccctggcaactatcagtgaccgccgcgacaccgttagcagagaaaagagatgcaatcatactcgggagtaaagataaatactccttgcgtagaaagataatccgcatattaatctaaccatcattttctataagacggcgtatttaatcgcattatacgatatggaatatctttcttttgtaaattgttcaacccggtgcaatggctattttgttattatttgatgaataatatcagtgcgtcataattcaagttaataaccttcagggatatcagttatatttaaactaaattaaagtcatgaataattttcttataatataaggtaaattaacaaaatggcttagcatttaacaataaccgaatagaaaacaaccatttcgccatcaacaatctcttacattcgcttatatattgaccacaactgatacatcagattatgtgatgactcgtgcttagatcaatttttgcaatcattagcaaaaagattaataagccatctatatcaatttatctaacctattatgccgttcaagaaatcgccgaacagttatttttaacaaatttttctcttcccattgactttcccggacaccttgtctgacctaaggtgcgcgaaagccactttttccttcctgagttatccacaaagttatgcacttgcaagagggtcattttcacactatcttgcagtgaatcccaaacataccccctatatatagtgttctaagcagcttcccgtactacaggtagtctgcatgaaactattgcggaaagaattccaaaaacaggtacgacatacatgaatcagaatctgctggtgacaaagcgcgacggtagcacagagcgcatcaatctcgacaaaatccatcgcgttctggattgggcggcagaaggactgcataacgttagcatttcccaggtcgagctgcgctcccacattcagttttatgacggtatcaagacctctgacatccacgaaaccattatcaaggctgccgcagacctgatctcccgtgatgcgccggattatcagtatctcgccgcgcgcctggcgatcttccacctgcgtaaaaaagcctacggccagtttgagccgcctgcgctgtacgaccacgtggtgaaaatggtcgagatgggcaaatacgataatcatctgctggaagactacacggaagaagagttcaagcagatggacacctttatcgatcacgaccgtgatatgaccttctcttatgctgccgttaagcagctggaaggcaaatatctggtacagaaccgcgtgaccggcgaaatctatgagagcgcccagttcctttatattctagttgccgcgtgcttgttcagcaactacccgcgtgaaacgcgcctgcaatatgtgaagcgtttttacgacgcggtttccacatttaaaattagcctgccgacgccaatcatgtccggcgtgcgtaccccgactcgtcagttcagctcctgcgtactgatcgagtgcggtgacagcctggattccatcaacgccacctccagcgcgattgttaaatacgtttcccagcgtgccgggatcggcatcaacgccgggcgtattcgtgcgctgggtagcccgattcgcggtggtgaagcgttccataccggctgcattccgttctacaaacatttccagacagcggtgaaatcctgctctcagggcggtgtgcgcggcggtgcggcaacgctgttctacccgatgtggcatctggaagtggaaagcctgctggtgttgaaaaacaaccgtggtgtggaaggcaaccgcgtgcgtcatatggactacggggtacaaatcaacaaactgatgtatacccgtctgctgaaaggtgaagatatcaccctgttcagcccgtccgacgtaccggggctgtacgacgcgttcttcgccgatcaggaagagtttgaacgtctgtataccaaatatgagaaagacgacagcatccgcaagcagcgtgtgaaagccgttgagctgttcagcctgatgatgcaggaacgtgcgtctaccggtcgtatctatattcagaacgttgaccactgcaatacccatagcccgtttgatccggccatcgcgccagtgcgtcagtctaacctgtgcctggagatagccctgccgaccaaaccgctgaacgacgtcaacgacgagaacggtgaaatcgcgctgtgtacgctgtctgctttcaacctgggcgcaattaataacctggatgaactggaagagctggcaattctggcggttcgtgcacttgacgcgctgctggattatcaggattacccgatcccggccgccaaacgtggagcgatgggtcgtcgtacgctgggtattggtgtgatcaacttcgcttactacctggcgaagcacggtaaacgctactccgacggcagcgccaacaacctgacgcataaaaccttcgaagccattcagtattacctgctgaaagcctctaatgagctggcgaaagagcaaggcgcgtgcccgtggtttaacgaaaccacttacgcgaaagggatcctgccgatcgatacctataagaaagatctggataccatcgctaatgagccgctgcattacgactgggaagctctgcgtgagagtatcaaaacgcacggtctgcgtaactccacgctttctgctctgatgccgtccgagacttctagccagatctctaacgccactaacggtattgaaccgccgcgcggttacgtcagcatcaaagcgagcaaagacggtattttgcgccaggtggtgccggactacgagcacctgcacgacgcctatgagctgctgtgggaaatgccgggtaacgatggttatctgcaactggtgggtatcatgcagaaatttatcgatcagagcatctctgccaacaccaactacgatccgagtcgcttcccgagtggaaaagtgccgatgcagcagttgctgaaagacctgctcaccgcctacaaattcggggtcaaaacactgtattatcagaacacccgtgacggcgctgaagacgcacaagacgatctggtgccgagtatccaggacgatggctgcgaaagcggcgcatgtaagatctgatattgagatgccggatgcggcgtaaacgccttatccggcctacggctcggtttgtaggcctgataagacgcgccagcgtcgcatcaggctccgggtgccggatgcagcgtgaacgccttatccggcctacggctcggatttgtaggcctgataagacgcgccagcgtcgcatcaggcacaggatgcggcgtaaaatgccttatccggcattaaactcccaacaggacacactcatggcatataccacctttagtcagacgaaaaatgatcagctcaaagaaccgatgttctttggtcagccggtcaacgtggctcgctacgatcagcaaaaatatgacatcttcgaaaagctgatcgaaaagcagctctctttcttctggcgtccggaagaagttgacgtctcccgcgaccgtatagattaccaggcgctgccggagcacgaaaaacacatctttatcagcaacctgaaatatcagacgctgctggattccattcagggtcgtagcccgaacgtggcgctattgccgcttatttctattccggaactggaaacctgggtcgaaacctgggcgttcagtgaaacgattcattcccgttcctatactcatatcattcgtaatatcgttaacgatccgtctgttgtgtttgacgatatcgtcaccaacgagcagatccagaaacgtgcggaagggatctccagctattacgatgagctgatcgaaatgaccagctactggcatctgctgggcgaaggtacccacaccgttaacggtaaaactgtgaccgttagcctgcgcgagctgaagaaaaaactgtatctctgcctgatgagcgttaacgcgctggaagcgattcgtttctacgtcagctttgcttgttccttcgcatttgcagaacgcgaattgatggaaggcaacgccaaaattattcgcctgattgcccgcgacgaagccctgcacctgaccggcacccagcatatgctgaatctgctgcgcagcggcgcggacgatcctgagatggcggaaattgccgaagagtgtaagcaggagtgctatgacctgtttgttcaggcagctcaacaggagaaagactgggcggattatctgttccgcgacggtagcatgattggtctgaataaagacattctctgccagtacgttgaatacatcaccaatatccgtatgcaggcagtcggtttggatctgccgttccagacgcgctccaacccgatcccgtggatcaacacttggctggtgtctgataacgtgcaggttgctccgcaggaagtggaagtcagttcttatctggtcgggcagattgacagcgaagtggacaccgacgatttgagtaacttccagctctgatggcccgcgttaccctgcgcatcactggcacacaactgctgtgccaggatgaacacccttcccttctggcggcgctggaatcccacaatgtggcggttgagtaccagtgtcgcgaaggttactgcggctcctgtcgcacacgcctggttgcaggtcaagttgactggattgccgaaccgttagcctttattcagccgggggaaattttgccctgttgttgccgggcaaaaggcgatattgaaatcgagatgtgaattggttgtagtgccagatacaacgcttatgcgtcttatctggcctacaacgattacatggcgtagtaatacgctttcacctgctcccagtccgctttggggattggctccagatatttttccagctggcggaagtcatgattaatcgctttatcgcgacgcaagcggcgacgacttttctccaggtcaagaaaaccagcttctgcattaccttctgttttcacatagatatggcgaacataacaacagccatgctgacgattaatgctatgcattttcttaaacgccagcgccactgctttcaacatggcttgccgtacttcgtcagaataagggcttactgcatgctgggcataccagtcagcaatgctgatgaaccccgccatatcttcagtcaccagcaacgctcgccattcaccctcaattttcaccgcttcaccaaaaacgatcttcggcacgatgacaccggcccgttccagttctttaattaccgcaacctcacggacaatcgttggtcggccgaacggataacgtacggaatgaaacagatgatgcgtcatgcgctttacatacagctttttgccgttgcgctcgacgcattgcaccccgctcataccattacggcgatagttaggctcttcaacccagtcgccctctgttgcccaccagtgattaaattcgtcgtactttgcactaactgccataccctatcgcctgtcatttttattaacgacaatgactataggtggttacctgaggaaaatcttaatgaaacgtgtcgtattaatgaatttcttttgccactactagcttgacaccgcttttacccttcatttgcagcgcatagattccaccagccactaccactaatagtgcgcccagcagataaaatgtgaatttaatcaggcggatacagcgatgaattttattcgacagggattaggcatcgccttacaaccagagttaacgctgaaaagcattgcaggtgaattgtgttccgttcctctcgaaccaactttctatcgacagattagcttgctggctaaagaaaagccggtagaaggcagtccactgtttttactacaaatgtgcatggaacaattagtggcgattggaaaaatttgatatgagacaggatggcgcatgaacgccatcctgcagtaacattactctttattaagaaattttactgccttatcagggaaatcagtaaacagcccatttacacccgctttgttatacagagcatcatataactgattcacatcaggagtgtattcaggcagtttatcactccgcacggtataaggatgcactaccagtttattctgctgagcatcttgcaccatgccagtgagtttgatattacccggctggcttgtctcctcaatcaacatatggtaatccggaccaataccatctgcatattccgccacctgtttcatggcacccggcttaaacatccagtcgtagttgtaattaacccagcttccatccggctgtttctgctgcgtttcattccagtcggtataggcaatcagctgtaccagattgagctccatgcccattttgggttccagctcattcttaatacgcttcagctcatcagcatcaaaacattgcaaataaactttatcgtctttaccggtgtaaccatatttcttcagcacttccagcgtttttgccgcaatatccttcccttcctgatgatggaaccacggcgctttgatttctggataaataccgatatttttcccggtagagtgatttaacccctgaacaaattcaatctcttcttcaaaggtgtgcacccggaagtcggacttacccattgggaaacgccccggataagtctgcacttttttaccgttttcaatatcgaaaccttcggtaaatttcaagctcttaatttcatccagcgtgaaatctatcgcgtagtaacgaccgtctttgcgcgcccgatccgggaaacgatcggcaacatcagtaacacgatcgaggtaatggtcatgcagaacaaccagattgtcgtctttggtcatcaccaaatcctgttccagataatccgctccctgcgcatacgccatcgcttttgctggcagcgtatgctccggcaaatatccactggcaccgcgatgggcgatgactattttttcgttgctgtccgccgccattgcactgcttcccatgactatagtgctcatcatgatcgccatgctaaggtttttcagcgtcaatttcatgccattagcctccgttgcgttcttgcagtaattgttcatggcgacgtttttcgccaatcatcacaacaatcaacaagataaccgccagaatgctgccgccaatcattaccataaagccgccatcccagccgaagaagtccacggtgtagccaacaatcgcgctcgccgccacgctaccgcccaggtaaccaaacagcccggtaaagcccgctgccgtacctgccgcttttttcggtgccagttccagcgcatgcagaccgatcagcatcacaggaccgtagatcaggaagccgataacaatcatacaaatcatatcgacggttgggttacctgccgggttcatccagtaaacgatagtcgcgatggtcaccagtgtcataaagaaaacgccggttgccccacggttgccacggaagactttatcgttcatccagccgcacagcagagtgcccggaatacctgcatattcataaaggaagtaggcccaggaggatttatctagcgcgaaatgcttaacctctttcagataagtcggactccagtcgaggatgccgtaacgcagcagataaacgaacacgttggcgatggcgatataccacagcagtttgttcggcagtacgtactgcatgaagatttgcttcgccgtcagctcctgttccgctttttcgttatagtcgtccggataatcatttttgtactcttcgatcggcggcaagccacaggattgcggggtatcgcgcatcatcgcaaaggcgaataatgccaccagaatggcgcagaaagcaggcatatagagcgccgcatgccagtcattgaaccaggccatccccagcaggaacagcagcggcggaataccaccaccgacgttgtgcgcacagttccacacactcacaatgccgccacgttctttctggctccaccagtgcaccatagtacgaccacacggcggccaccccatcccctggaaccaaccgcagaggaacaacagtacaaacatcaccgcaatgctgctcgtcgcccatggcacaaagcccataaacaacatcactgccgccgccagaatcaaacctgcgggcaggaaaacgcgcggattgctgcgatcgcttacgctacccatgatgaatttgctaaatccataagcaatgctgatcccgctaagggcaaaacctaaatcaccgcgactgaatccctgctcaaccagataaggcatagcaagcgcaaagttcttacgaaccaaatagtaagccgcatagccaaagaatatccccaggaaaatttgccagcgcaatcgacgataagtcggatcgatctccgcggcaggtaagcgcgctttgtgtggcgctggtttaaaaatactcaacattgatagcctccgtggcccgtggtcttatttatgattaacagcctgattcagtgagagaacctgccgtttcttgagttgccgcgatgttaagaaaacattcataaattaaatgtgaattgccgcacacattattaaataagatttacaaaatgttcaaaatgacgcatgaaatcacgtttcactttcgaattatgagcgaatatgcgcgaaatcaaacaattcatgtttttactatggctaaatggtaaaaaacgaacttcagagggataacaatgaaaactcgcgacagccaaagtagtgacgtgattatcattggcggcggcgcaacgggagccgggattgcccgcgactgtgccctgcgcgggctgcgcgtgattttggttgagcgccacgacatcgcaaccggtgccaccgggcgtaaccacggcctgctgcacagcggtgcgcgctatgcggtaaccgatgcggaaagcgcccgcgaatgcattagtgaaaaccagatcctgaaacgcattgcacgtcactgcgttgaaccaaccaacggcctgtttatcaccctgccggaagatgacctctccttccaggccacttttattcgcgcctgcgaagaagcagggatcagcgcagaagctatagacccgcagcaagcgcgcattatcgaacctgccgttaacccggcactgattggcgcggtgaaagttccggatggcaccgttgatccatttcgtctgaccgcagcaaacatgctggatgccaaagaacacggtgccgttatccttaccgctcatgaagtcacggggctgattcgtgaaggcgcgacggtgtgcggtgttcgtgtacgtaaccatctcaccggcgaaactcaggcccttcatgcacctgtcgtggttaatgccgctgggatctgggggcaacacattgccgaatatgccgatctgcgcattcgcatgttcccggcgaaaggaagcctgctgatcatggatcaccgcattaaccagcatgtgatcaaccgctgccgtaaaccttccgacgccgatattctggtgcctggcgataccattagcctgattggtaccacctctttacgtattgattacaacgagattgacgataatcgagtgacggcagaagaggttgatattctgctgcgtgaaggggaaaaactggcccccgtgatggcgaaaacgcgcattttgcgggcctattctggcgtgcgcccgctggttgccagcgatgacgacccgagcggacgtaacgtcagccgtggcatcgtgctgctcgaccatgctgaacgcgatggtctggacggatttatcaccatcaccggtggcaaactgatgacctatcggctgatggctgaatgggctaccgacgcggtatgccgcaaactgggcaacacgcgcccctgtacgactgccgatctggcactgcctggtagtcaagaacccgctgaagttaccttgcgtaaagtcatctccctgcctgccccgctgcgcggttctgcggtttatcgtcatggcgatcgcacgcctgcctggctgagcgaaggccgtctgcaccgtagcctggtatgtgagtgcgaagcggtaactgcgggtgaagtgcagtacgcggtagaaaatttaaacgttaatagcctgctggatttacgccgtcgtacccgtgtggggatgggcacctgccagggcgaactctgcgcctgccgcgctgccggactgctgcaacgttttaacgtcacgacgtccgcgcaatctatcgagcaactttccaccttccttaacgaacgctggaaaggcgtgcaacccatcgcctggggagatgcactgcgcgaaagcgaatttacccgctgggtttatcagggattgtgtggtctggagaaggagcagaaagatgcgctttgatactgtcattatgggcggcggcctcgccggattactctgtggcctgcaactgcaaaaacacggcctgcgctgtgccattgtcactcgtggtcaaagcgcactgcatttcagttccggaagcctggatttgctgagccatctgccagatggtcaaccggtgacagacattcacagtggactggaatctttgcgtcagcaggcaccagcccatccttactcccttctcgagccacaacgcgtgctcgatctcgcttgccaggcgcaggcattaatcgctgaaagcggtgcgcaattgcagggcagcgtagaacttgctcaccagcgggttacgccgctcggcactctgcgctctacctggctaagtagcccagaagtccccgtctggccgctgcccgcgaagaaaatatgtgtagtgggaattagcggcctgatggattttcaggcgcaccttgcggcagctagcttgcgtgaactcggccttgccgttgaaaccgcagaaatagagctgccggaactggatgtgctgcgcaataacgccaccgaatttcgcgcggtgaatatcgcccgtttccttgataatgaagaaaactggccgctgttacttgatgcgcttattcctgtcgccaatacctgcgaaatgatcctgatgcccgcctgcttcggtctggccgatgacaaactgtggcgttggttgaatgaaaaactaccttgtagtctgatgcttttgccaacgctgccgccttccgtgctgggcattcgtctgcaaaaccagttacagcgccagtttgtgcgccagggtggcgtgtggatgccgggcgatgaagtgaaaaaagtgacctgtaaaaatggcgtagtgaacgaaatctggacccgcaatcacgccgatattccgctacgtccacgtttcgcggttctcgccagcggcagtttctttagtggcggactggtagcggaacgtaacggcattcgagagccgattctcggccttgatgtgctacaaaccgccacgcggggtgaatggtataagggagatttttttgcgccgcaaccgtggcagcagttcggtgtaaccactgatgagacgctacgcccgagtcaggcagggcaaaccattgaaaacctgtttgccatcggtagcgtgctgggcggatttgatcccatcgcccagggatgcggcggcggtgtttgtgccgtcagtgctttacatgccgctcaacagattgcccaacgcgcaggaggccaacaatgaatgacaccagcttcgaaaactgcattaagtgcaccgtctgcaccaccgcctgcccggtgagccgggtgaatcccggttatccagggccaaaacaagccgggccggatggcgagcgtctgcgtttgaaagatggcgcactgtatgacgaggcgctgaaatattgcatcaactgcaaacgttgtgaagtcgcctgcccgtccgatgtgaagattggcgatattatccagcgcgcgcgggcgaaatatgacaccacgcgcccgagcctgcgtaattttgtgttgagtcataccgacctgatgggtagcgtttccacgccgttcgcaccaatcgtcaacaccgctaccagcctgaaaccggtgcggcagctgcttgatgcggcgttaaaaatcgatcatcgccgcacgctaccgaaatactccttcggcacgttccgtcgctggtatcgcagcgtggcggctcagcaagcacaatataaagaccaggtcgctttctttcacggctgcttcgttaactacaaccatccgcagttaggtaaagatttaattaaagtgctcaacgcaatgggtaccggtgtacaactgctcagcaaagaaaaatgctgcggcgtaccgctaatcgccaacggctttaccgataaagcacgcaaacaggcaattacgaatgtagagagcatccgcgaagctgtgggagtaaaaggcattccggtgattgccacctccagtacctgtacatttgccctgcgcgacgaatacccggaagtgctgaatgtcgacaacaaaggcttgcgcgatcatatcgaactggcaacccgctggctgtggcgcaagctggacgaaggcaaaacgttaccgctgaaaccgctgccgctgaaagtggtttatcacactccgtgccatatggaaaaaatgggctggacgctctacaccctggagctgttgcgtaacatcccggggcttgagttaacggtgctggattcccagtgctgcggtattgcgggtacttacggtttcaaaaaagagaactaccccaccagtcaagccatcggcgcaccactgttccgccagatagaagaaagcggcgcagatctggtggtcaccgactgcgaaacctgtaaatggcagattgagatgtccacaagtcttcgctgcgaacatccgattacgctactggcccaggcgctggcttaaactcctttctgatgcccggtaagcatgtggttaccgggcatttttgcgtacacgattccgtgcccaatgtatgcgttgcaacgcagtgaaaattcctctgaaaacgtctcgcaaaggctgaaactggcagatgtcaaaggcctgggataaccgtaatgtcgcgtcatcataaatatcaggtgacggacaaccatgaccgaaagtacaacctcctccccgcatgatgcggtatttaaaacctttatgttcacacccgaaaccgcacgggattttctcgaaatacatttaccagaaccactgcgcaagctttgcaacctgcaaaccttacgcctggaacccactagttttattgaaaaaagtttacgcgcttactacagcgatgttttgtggtccgtggaaaccagcgacggtgacggctatatctactgcgtgattgaacatcaaagctctgcagaaaagaatatggcttttcggctaatgcgctatgccactgccgccatgcagcgtcaccaggacaaaggctatgacagagtcccgctggtggtgccgttgctgttttatcatggcgaaaccagcccttacccgtacagtctcaactggctggatgagtttgacgatccgcaacttgcccggcagttgtacaccgaagcttttctgttggtggatatcaccatcgtacctgacgatgagatcatgcaacatcggcgtatagctctgctggaactgattcaaaagcatattcgcgaccgcgatttaatcggcatggtcgacaggatcaccacgcttttggttagaggcttcactaatgacagccagctacaaacactgtttaattatctgctgcaatgcggcgatacctcccgtttcacccgttttattgaggagattgccgaacgtagtccactacaaaaggagagattaatgactattgctgaacggctacggcaggaagggcatcaaattggctggcaggaaggtatgcatgaacaagccattaaaattgctttgcgcatgctggagcagggctttgaacgtgagattgtgctggcgacaacccaactcactgatgctgatattccgaactgtcattaaaaggagagattaatgactattgctgaacggctgcggcaggaaggacatcaaattggctggcaggaaggtaaattagaaggtttgcatgaacaagccattaaaattgctttgcgcatgctggaacagggctttgatcgtgaccaggtgctcgcggccacccagctaagcgaagccgatctggcagcgaataaccactaattaacacaggcccacagccgatccccatgggcctttgatatcaataactaccttttatgcgtggcccatttttgccacttttaaacatcgccagtcgttgatccagggcatcgctgtagagcatcgtgtcaacgccaacagcgacaaagttcgctccccacgccaggcattgctgcgccatatcaggagccacagccagaaaaccagccgctttacccgcagcacggatccgccgaatactggtttcaataattcgctgcacttccgggtgcccggcgttatccgggtagcccaagctcgcagaaagatccgcaggtccaataaacacgccatcaatcccttcgacgtcgaggatttcgtccaggttatccagtgccgttttactttccacctgcaccaacagacaaaggctatcgttaacttgcgccatgtaattctcaatgcgtccccagcgcgcagcccgtgccacactggccccgacaccacgctcaccgtagggaggatagcgcgtggcagacaccacctgacgtgcctgttcggcagtatcgaccatcgggatcagtagagtttgcgcgccaatatccaggacttgtttaatcagcggtttactgccttccaccggacggatcacgggttggctggcatagggcgctaccgcctgtagctgatgataaagatcctgaatggtgtttggcgcgtgctccccgtcaatcagcaaccagtcataaccagaagtggcggcaatttctgccatataggcagtcgtactgcttaaccacagaccaatttgcacttcgcccttgcgtaaacgttctttaaagggattgcttaataatgcgttcatcgtgttccttaacctatttaatgatgtgccacgtcggtctgcgcaacagtgcgatttacacgcagagtgaaaataatcaggctaccgatgaccgccaccgctgccagcgtcagtaatcccgccgcatcgctggcaaataacgtttctgctttcacgcgcaggatcggggcaataaacccgcccactgcaccaaacaggtttacaaaaccaattcccgcagccagcgccgtaccggaaagcagttgtgtcggcatcgtccagaacactggctgcacggcaataaacccgatagctgcaacacacagcgctacgatcgccattactggagaaagcagcccggacagaccaataccaatgcccgccgccagtaatgtcagcgctgcgacattacgccgttcgccggttttatcggaatagcgcggaataagccaggtcccaaacaaggccgcaacccacggaatggcggtgaccacgctcgctgtaaagcccacttttgttcccagcaatgccgcaacctgggtcggcaggaagaaaattaatccgtaaaccgccacctgaatggtcaggtagataatcgctagttgccagactcggccattacgcagcgcatcgctcagccgagaagtcactttctgttgttcttcacttgccagttgattgataagcaacgttttttcttgtttactcagaaaacgtgcctgctccggtgtgtcatcaagccaaaagaatgtgaataccccagcaccgactgccaacaatccttcaatcacaaacatccagaaccagccgggatgccccataaatccatgcatctccaacagcgcgccggaaagcggacttcccagtgttaacgccagcggtgcgcccatatagaacagccccataatgctggcgcgattacgctgcggaaaccattggctggtgagataaatcataccagggaaaaatccggcctccgcagcacgaagcagagtgcgaactatcagaaatttcgcttcagtatcggcccatgccatggctgcgctaagaaatccccacagcagtgttgtcgtaccaatccaggttctggcccccagtttgcgcatcaaaagattcgccggaacacccagaaacgcatataccacaaagaaaatgcctgctcccagcgcataagcttcattactcaacccggtatcaatctggtaggtctgtttggcaaaaccgatattgctacggtcgagaaacgccagcacatacagcgccaacataaacggaattaaacgcacacggtttttcttcaccacggcgtcaagcaaagcggtgctcataaaaagctccttagaatatgtgggcgttaccgttgtcacagcaacgcccggagtgattagtggctgtaggggcgtttcaaattgcagtcatgattgagttcgacgccaaaaccgggtttatcaagcacacttttatgaatacgaccattcaccggaaccggctcattgagcagaatcgggtcaaactgcggacgcatcgtactacaatccgggctggtcatcaggaattcgctgaatggcgtattggtgaaggtgatcaccgcatggtgagagtaaacagagctaccgtgcggcaccaccagttgccccctggatttggcgattgcggcaatttccaccagcgtggttaaaccaccgcaccagccaacatccggctgcataatgtcgataccggtttcactaagcgtacgaaaagattgcagtgtgccgtggtgctcaccgctggtgaccatcattccgactggcgcgttgcgtttcagttcgcgataactttcatactgctgtggcggcaggcactcttcgatccatttcaggttatagggcgcgcaagcgtgggccagtttggtcgcatagttcacgtcctgactcatccagcagtcgagcattaaccagaaatcctcaccgcatttttcacgcatatccgcgaccatagcggcatctttgcggatccccgcatcgccatcatgtggcccccagtgcgtcggcattttgccaccgataaagcccatctcttttgccagatccggacgcgcacctgtggcgtagaactgaatctcatcacgaacagcgccgcctaaaagtttataaaccggaagcccgaccactttgccgaacagatcccacagagccagatcgacacaagaaatcgtattcatcaccaggccaccagagccggagtaatacagggtggcactgagcatttgatcgtggatcagtttgatatcactgacacatttaccctcaatgaaacggttaagatgtttttcgacaataaaacagcccatttcaccggctgtgctaacggcgaatccggtctggccgttttctgcttcgacttcaacaaccaacgtgccaagaacgttaatgccaaaactctggcgactctgctcgtaatcgcggtatttactcatcggggtggcaatatgatcgtctatccagtgattcgccccctggtcgtgataatcaccgccgccagcgcctttttctgctgtcgcaccgccagtaaaccaggcgcgaacctgtttaatttttggtagggtcatgatgttctccattgttaactggcttgtaagtcaaagggacttttccatcccaacagacgactaatatccctggcgcaggcaatggccttgcccgccagataatcacggtattcttcattgatttgtaagcgggtaccgaccacgctgatcgcagcggtaagctcgttattggcgttaaacaccggcgcagcgacacaacggacatcggcgtaatcttcgccgttgtcatagctccagccctgacggcgaatacgcgccagttcttcgtgaagttgctgtggatgagtaatcgttgtgggtgtcgcctgctcccagaccagcccttcgataatactttgctgtaccgctgcaggttgccaggcaagcaggcatttacctattccggagcgataaaggctaaggctttttccttcatgggaacgcacgctgatagtggcactactctccactttcaaaatgtaataagcgctgccgttatcaataatccccaggtgacataacagcccggtggtatccatcagttgcgtcaaacgcggtcgagccagttcccggagatccatcttgcttaacgcatgaccggaaagctccaccagcctggtccacaaacaaaaattttcctggtgatcaaggctaagaaaacgctgacgcctgagttcattaagcagcaaataggccgtgcttttagggattcccaatgtgtcaatgatcgtcgcagcactacaggggccaatgcgggcaatcaaattgagaatatcaatagcccgtgtcagggcgggaactttgctactttccaacatactggactccagtcttagatactggaatcagtctcgttgctcagggggagtaaaattgtgaagcgcatcaaatcccgctcctcgtccagcagactggagaaattacgcacaaatttgtgaatcagcgcacggattttttcttattgagtacaacaggttggacaaattttgccggagggggaatgtgccggtgcagtaaaccggcacagagtggcggaatcagacagataaggtcatggactcaacaacctcaatccagccatgctcactggcgatatcctggccgtttaaccaacggcgcagcatattcagtgccatcattgcgcacacttcctgacggatagccaggctgtagcgcgtagtgctgaaacgcacacgcagagcgaaagtgccgtctggcgtggctagcgcaaagttgagatgctcgttctcgaaaccgctaacagccagtgccagcccggcaaaatggttggcccgccgttctgtaatccagtgcgcagtttgcgccagggtttcctcctgactaggaaccacttcacacgccagcaatggagcacctgcgcgagaaagttgcaaagccaataaaccaccggtgaattgctcgctcaacgtcaggctgaactggcggttttgcaattcgcgactgatctgcgcgggcagtccttcagtgccttcgaaaatcacgctctgtccggcaacacgtttaacatccagccacagtttttccatcgcctgttgctcgcttgccggtccggtgagtttcagttcgatgataggcatactggagcgatagcccattgttacgcccggcggcagttgtagagtgtccaggctttgtgccagatcgctttcgctacgaccaaaagtagtcaaacgcagacaaaccggcggctgcggtaaagaaaaacgctcgcgcaggcgcggcaggatttcgtgctcgaccatcaccttaaattcactcggtacgccgggagtaaagaacatcaggcaacgattaagctgcacggcaaaaccacaggcggtgcctaccgggttattgataaattcagcactggcaggcagctccgcttgtttacggttgctcggtgccattactcgtccacgttcgtggaaatagcgttccatctctttgagccaggcttcatgcagcaccaggccttcaccttttgctgtcgcagcggcgagtgcgcttaaatcatcgctggtcggtcccagcccgccgttaacgatcagcacatcggcgtgctgactacgttcgcgaagaatggtgactaagtcatcaaggttatcccccaccgtattgcggcgagataatggcaacccctgatgaaagaaaaaatcggccagccaggcagcgttagtgtcaacgatttgcccgtgtaacacttcatccccggtggataacatttccacttttaacatggttatctcctgcttttgttatcgaatcactataacgcaaagggagataaggcgtagtaagaaactgaatggcgcgacagaatgccgcgccggaagggatcagaaactggcgttaaccccaacatacgggccgtcagccacggcgttgtcgcggttaccgtctttaccgctcagattcaggtagcgataacccgcctcaatactgactggacgcataatggtgtaacgcgcgccagcattcgcttcttcataactttgaataccgctggagaggctatccggagagtagtaatactcgccaaacaaacggaagctgttgccaattttccactgcaaaccacctcctaccgctgcggcataaccttcatcgccgtaattcgggttggtgtaaacgccttttccgccaacggtcgccattaacggcccgagaggcagattcaaccccagccccacgccagcgacatcaccgtcgtcgtcgttatgtgtccagttaccgcttaacgccaggcccgtcgtttcagtcccaaaaccgacaccaatattggtgtattctttacccgcctgaccgctgatgctcattgcattgacgcttgcagaaaccaacagcattccggccagacctgctagcgcaatttttttcattatcccctttcccacaagcaattaatcaaaattcccaaagctgcgggattgtactgcctggcacagaggattcaatgagcgaaaaaaaggatctagtcacttattgtaactaaatacttcttaaataattaaatgccgaaaaaataaacacactttatcgatacacacaaaaataataataagtacagttatcatcgcaaaagagattactgtcactttcacatatttgtgagttaccgtattctcatggtttctttttatttataaggaatatccctgtgcgacaacggactattgtatgccctttgattcaaaatgatggtgcttatttgctgtgtaaaatggccgacgatcgcggcgttttccccggtcaatgggcgattagcggtggcggcgtggagcctggcgaacgaattgaagaggcactacgccgcgaaattcgcgaagaactgggagaacagctgcttttgacagaaatcacgccgtggaccttcagcgatgatattcgcaccaagacgtatgcagatggtcgcaaggaagagatttatatgatttacctgatttttgactgcgtttctgccaaccgagaagtgaaaataaacgaagagtttcaggactacgcgtgggtaaaacctgaagatctggtgcattatgatttgaatgtcgccacccgaaaaacgttacgtttgaaaggtcttctgtaacaatgatgacagccattactggctgtcagattgaaaatttagtggttaacgaattccccatccagataaactttgcctttttccacatgcatgactaaaccatccagataatcaggtttaaatgtcgcgtcacgcttatctttagcaatatatgtcaggcaatgattatgggtgaaaataacgatatttttatcaggcgctttgctttgtaagtccttaattgcactataaatctcattaccgcactgaagaagtcgtttatctaccgtcaattttttacccgcactaaaccaggtagcgctctgaatggtccggacggtattactggaataaagatcgaaatcagggatatcagcactaaaagcgttgcccagttcacgggcatcctgggtacctttaaccgtaatacctgttttatcactcaagcattgattggtactacggtcgcaacgttcagcatgacgaaacaaaacgacaaccgggtgctgctgtgccagtctggccagtgttttattgtcgatacgtggcaaaccattgctactccaggcggcatgagtacccagtccggcaattgcagcgagcgccagtaaaatgatgatatattttttactcttcaagctagagcggcaaaaagctaacacgtaaactccacctatagacaagcgcaaccagacaattaccgtgaaattgagctacatttctggcgataattcgcagttggtgtaatattaaaaatcctacgatgtcggcaaaatgcctcaaaattttgccaaatgcaaagcctaaataagaaaaaatataaaaatttcaatatttacgtctaatattagtttcttaaggttaagttaatattctatccttaaaatttcgctccaaatggcaaaatatacacaacactctttatagcaaatataagtggacaggtattcaatggcggaaggaaaagcaatgagtgaatttttgccttttagccgaccagcaatgggcgtggaggaactcgctgcagttaaagaggttctcgaatccggttggatcacaaccggtccgaagaatcaggcgcttgagcaagctttttgccagttgacgggaaatcagcatgccatcgcggtcagtagtgccaccgccggaatgcatatcacgctaatggcgttgaaaattggcaagggcgatgaagtgattacgccttccctgacctgggttagtaccctcaatatgatttccttgttgggtgcaacgccggtaatggtggatgtcgaccgcgatacgctgatggtcacgcctgaagctatcgagagtgccattacgccacgcactaaagccatcattccggtgcattatgccggtgcgccagcagatattgacgccattcgcgccattggcgaacgttacggcatcgcagttatcgaagatgctgcccatgccgtcggtacgtattacaaagggcgacatattggcgcaaaaggtaccgctatttttagttttcatgccattaaaaatattacctgtgctgaaggtggcctgattgtaactgataatgaaaaccttgcccgccagctacggatgctgaaatttcacggtctgggtgtcgatgcctatgacagacaaacctggggccgtgcaccgcaggctgaagtcttaacaccgggctataagtacaatctgaccgatattaacgccgcgattgccctgacacagttagtcaaattagagcacctcaacacccgtcggcgcgaaattgcccagcaatatcagcaagcactggcagctctcccctttcagccattaagccttcccgcctggccgcacgttcacgcctggcatctgtttattattcgtgtcgatgaacaacgttgtggtatcagtcgcgatgcgttgatggaagcgttaaaagaaagaggcattggtaccgggttacatttccgcgccgctcacacacaaaaatattatcgcgagcgttttcccacgctgagcttaccgaataccgaatggaatagcgaacgcatctgttctttgccgctgttcccggatatgactaccgccgatgccgaccatgtcatcacagcccttcagcaactcgcaggacaataagccatgtttgaaatccaccctgttaagaaagtcagcgtggttattcccgtttataacgagcaggaaagcttaccggaattaatcaggcgcaccaccacagcctgtgaaagcttggggaaagagtatgagatcctgctgattgatgacggcagtagcgataattccgcgcatatgctggtcgaagccagtcaagcggagaacagccatattgtgtctattttgcttaaccgcaattacgggcaacatagtgcgattatggcgggattcagtcacgttactggcgacttaattattacccttgatgccgatctccagaatccgccagaagaaatcccccgcctggtggcaaaagccgatgaaggttacgacgtggtagggactgtacgccagaaccgccaggacagctggtttcgtaaaaccgctagcaagatgattaaccggcttattcagcgcaccactggcaaagcgatgggtgattacggttgtatgctgcgcgcctatcgccgtcatattgtcgatgcgatgttgcactgccatgaacgcagcacctttatcccgattctggcgaatatcttcgcccgccgtgccattgaaattccagtacatcatgccgagcgtgagtttggtgaatccaaatacagttttatgcgcctgattaatttgatgtacgacctggtgacctgccttaccacaacgccgctacgtatgctgagtctgctcggcagcattattgcgattggaggttttagcattgcggtgctgctggtgattttacgcctgaccttcggaccacaatgggcggcagaaggcgtctttatgctatttgccgtgctgtttacttttattggcgctcagtttatcggcatgggattactcggtgaatatatcggcaggatctacaccgatgtccgcgcccgcccccgctattttgttcagcaagttatccgtccatccagcaaggaaaatgaataatgaaaaccgtcgtttttgcctaccacgatatgggatgcctcggtattgaagccctgctggctgccggttacgaaattagcgccatttttacccatactgataatcccggtgaaaaagccttttatggtagcgtggctcgtctggcggcggaaagaggcattccggtttatgcgccggataacgttaatcatccgctgtgggtggaacgcattgcccaactgagcccagatgtgattttctctttttattatcgccatcttatttacgacgaaattttgcagctcgctcccgcaggtgcatttaatctgcatggtagcctgttaccaaaatatcgtggtcgcgcgccgctgaactgggtgctggtcaacggtgaaacggaaactggcgttacattgcaccgaatggtgaaacgtgccgatgccggggccattgtggcgcaactgcgcattgccattgcgccagacgatatcgctattacgctgcatcataaattgtgccatgccgcgcgccagctactggaacagacattacccgccattaaacacggtaatattctggaaatcgcccagcgcgaaaacgaagccacctgttttggtcgcagaacgccggatgacagtttccttgaatggcataaaccggcatccgtactgcacaacatggtacgtgccgttgccgatccgtggccgggtgccttcagctatgttggcaatcagaaattcaccgtctggagcagccgtgttcatcctcatgccagcaaagcacagccggggagcgtgatttctgttgcgccactgctgattgcctgtggcgatggcgcgctggaaatcgtcaccggacaggcgggcgacggcattactatgcagggcagccaattagcgcagacgctgggcctggtgcaaggtagtcgcttgaatagccagcctgcctgcaccgcccgacgccgtacccgggtactcatcctcggggtgaatggctttattggcaaccatctgacagaacgcctgctgcgcgaagatcattatgaagtttacggtctggatattggcagcgatgcgataagccgttttctgaatcatccgcattttcactttgttgaaggcgatatcagtattcattccgaatggattgagtatcatgtcaaaaaatgtgatgtcgtcttgccgctggtggcgatagccacgccgattgaatatacccgcaacccgctgcgcgtatttgaactcgattttgaagagaatctgcgcattatccgctactgcgtgaagtaccgtaagcgaatcatcttcccgagtactagtgaagtttatgggatgtgtagcgataaatacttcgatgaggaccattctaatttaatcgtcggcccggtgaataaaccacgctggatttatagcgtaagtaaacaattacttgatcgggtgatctgggcctatggcgaaaaagagggtttacagttcaccctcttccgcccgtttaactggatgggaccacgactggataaccttaatgcagcgcgaattggcagctcccgcgctattacgcaactcattctcaatctggtagaaggtagtccgattaagctgattgatggcggaaaacaaaaacgctgctttactgatattcgcgatggtatcgaggcgttataccgcattatcgaaaatgcgggaaatcgctgcgacggtgaaattatcaacattggcaatcctgagaacgaagcgagcattgaggaactgggcgagatgctgctggcgagcttcgaaaaacatccgctgcgccatcatttcccaccgtttgcgggctttcgcgttgtcgaaagtagcagctactacggcaaaggatatcaggacgtagagcatcgtaaaccgagcatccgcaatgcccaccgctgcctggactgggagccgaaaattgatatgcaggaaaccatcgacgaaacgctggatttcttcctgcgcaccgttgatcttacggataaaccaagttgacctaagatcttacggataaaccatcatgaccaaagtaggcttacgcattgatgtcgatacctttcgtggcacccgtgaaggcgtgccgcgtctgctggaaatcttgagtaagcataatattcaggccagcatttttttcagcgtcggcccggacaatatgggccgccatctctggcgactggtgaagccacagtttttgtggaagatgctgcgcagtaacgcggcaagcctttatggctgggatattttactggcaggtacggcctggccaggtaaagagattggtcatgccaatgccgatatcattcgtgaagcggctaaacatcacgaagtcggcctgcacgcctgggatcaccatgcctggcaagcccgtagcggtaactgggatcggcaaacaatgatcgacgatattgcacgcggtcttcgcactctggaagagattatcggtcaaccggtaacctgttctgccgctgcgggctggcgtgccgaccagaaggtgatcgaagcaaaagaagcgttccatttgcgctacaacagcgattgtcgtggggccatgccgttccgtccattgctcgaaagtggaaaccctggcactgcgcaaattccggtgaccttacccacctgggatgaagtgattggtcgggatgtgaaagcagaagattttaacggttggttactcaaccgcatcctgcgagataaaggcacgccggtttataccattcatgcagaagttgaaggctgcgcttatcagcataattttgtggatctcctcaaacgcgcagctcaggaaggcgtgacattttgccctttaagcgaactgttaagtgagacgttgccgctcggacaagttgttcgcggaaatattgccggacgtgaaggctggctgggttgccaacaaattgcgggtagtcgctgatgaaaagcgtacgttaccttatcggcctcttcgcgtttattgcctgctattacctgttaccgatcagcacgcgtctgctctggcaacccgatgaaacgcgttatgcggaaatcagtcgagaaatgctggcatccggcgactggattgtgccccatctgttagggctacgttatttcgaaaaacccattgccggatactggattaacagcattgggcaatggctatttggcgcgaataactttggtgtgcgggcaggcgttatctttgcgaccctgttaactgccgcgctggtgacctggtttactctgcgcttatggcgcgataaacgtctggctctactcgccacagtaatttatctcagtttgtttattgtctatgccatcggcacttatgccgtgctcgatccgtttattgcattctggctggtggcgggaatgtgcagcttctggctggcaatgcaggcacagacgtggaaaggcaaaagcgcaggatttttactgctgggaatcacctgcggcatgggggtgatgaccaaaggttttctcgcccttgccgtgccggtattaagcgtgctgccatgggtagcgacgcaaaaacgctggaaagatctctttatttacggctggctggcggttatcagttgcgtactgacggttctcccttggggactggcgatagcgcagcgggagcctaacttctggcactattttttctgggttgagcatattcaacgctttgcactggatgatgcccaacatagagctccgttctggtactacgtgccggtcatcattgccggtagcctgccgtggctgggattactccccggtgcactgtacacaggctggaaaaaccgcaagcattccgcaaccgtctatttgttgagctggacgataatgccgctgctgtttttctccgtcgctaaaggtaaattgcccacctatattctttcctgctttgcatctctggcaatgctgatggcgcattacgctttgctggcagcaaaaaataatcctctggcgctgcggattaatggctggattaacatcgcttttggcgtcactggcattattgccacatttgtggtctccccgtggggaccaatgaacacgccggtgtggcaaaccttcgagagctataaagtcttttgtgcctggagcatttttagcctatgggcatttttcggctggtacaccttaacaaacgtcgaaaagacctggccttttgccgcgctttgcccgctggggctggcgttgctggtaggatttagtattcctgacagagttatggaaggaaaacatccgcaattttttgtcgagatgacacaagaaagtcttcagccaagccgctatattcttactgatagcgtcggtgttgccgcaggtctggcatggagcctgcaacgcgatgacatcatcatgtatcgccagacaggtgagttgaaatacggccttaattatccggatgcgaaagggagatttgtcagcggtgatgagttcgcaaactggcttaatcaacatcgtcaggaggggattattactctcgtgcttagcgttgaccgcgatgaagatatcaacagtctcgccattccgcccgcagatgccatcgatcgtcaggagcgtctggtgctgattcagtatcgtcccaaatgatctggctaacattagtctttgccagcttgcttagcgttgccgggcagttgtgtcagaaacaggcaacctgctttgtggcgataaacaaacggcgcaaacatatcgtgctgtggctgggactggcgctggcttgtcttggtcttgccatggtgctctggctgctggtcttgcagaacgtaccggtaggcattgcttacccgatgttaagtctgaattttgtctgggtgacgctggctgcagtaaaactgtggcacgaaccggtaagcccgcgtcactggtgtggggtggcgttcattattggcggcattgtgaacctcgggagtacggtgtaatgggcctgatgtggggattattcagcgtcattattgccagtgttgcgcaattaagcctgggttttgcggcgagtcatctgccgccgatgacgcacttatgggattttatcgcggctctgttagcttttggcctggatgcccggatactgttactcgggctgctgggttatctgctttccgttttttgttggtataaaacgcttcataaacttgcgctaagcaaagcctatgccttgctcagtatgagttatgtgctggtatggattgctagtatggtacttcccggctgggaagggacttttagcctgaaagcactactgggagtagcctgtattatgagcgggttgatgctgattttcctgcccacgacaaaacaacgttactgagttttccctgccactttacactgccgttcccactcatcggggctataactgcttgcgctgaggactttcaccgtatgcagcttttcacgattaatacaataaagcgcattctgcaaagggctgagtaaatcccccactttcacggcgaagtcactcttcacttcggcgatcatttttatcgcgccgccagcatcgcagagcataagtacatgtctgttatcttgtttattgcagcagctttttttgaccagccattccattgcattatcctgtttgctaagagttttcacatcaatttacagattaacagataaactctttatcaacggcaatggaatggcagaaatgagaagtgaaacggagggttaattattgctgacgttgcacccactcttttagcgcctgacgactaattttaataccgccgtttttcagctccggcggcagagttagccagcgcaccggttgttgaaaacgggccagcttatctttcacccattcactaagatcaacgctctcgtggtcatactccatcaccgccaccggtcgatgaccaaactccttgtcggcaacggggacgataaacacctgcaaaaccgcaggatgtgcagcaattacgcgctcgacttcttccggctgaataccctctccgccactgaagaatagattgtctaaacgtccgacaatggtcagcttgccattatgcatctcaccgcgatcgcgcgtagcgtaccagccttcgtcattaaccagactaaccagttgcccgttacgccagtaaccttctgccatactggcagcccgcagccacacttcattattaacgattttcacttcccgacccggcagcgggctaccaacgtctgccaggccgtcggcttctttcgcacacaccgtggaggcaaactcggtcagaccatagccgcaaaagcaacgaatcccctgctcgcgcgcctgttccgtcaactcgaccgggatagccgcgccgccaagtaacaccgctttcagggaaacggaactacggttaaccagcaaacgccagagttgtgttggcaccagactagcgtgagtacagcctgccagcatttgctccaatggctgtttatcacgtaccgtcatccgcgcaccagcgtataaccagcgccacataattccctgaccggagacgtgaaacagcggtaaagagagcaaccaatcatcgtgatcgccaaacggaatcaggcttaacacaccttgcgcactggcaagatgggcctgataagtatggacagcggctttcggcaaaccggtagaaccgctggtcaacgtcatactgcacagacgcgtcggctgccacgtagcggcatgtgcgccttcaaccagctgaatgtgcaggctcgttaatgccggaaacgtgttttccccatccggcaccagagcaaattgcagcgtcagattgggcagcaattcttcaagcaacggttgcggcagctgagggttcacgggcaacacccgcgccccgcattgcagtaacgccagccaggcgagcagcgtttgcggcgtattccacgcccgcaacatcacgccgctgccctcaaccaccccctgcaccgcaaatccggaggctaattcatcgacgcgagcacaaagctcgcgccagttgagttgctcgtcattaagacgtaaggcgatggtttctccccgcacttgccgccagtgacgccacggccagtcagagaagatcataacaaccgctccagtgcatcaacttccacgacaggcagcgtgctacccggccagcgacgtacctgctgcgcctgcatcagatccagcgtgtccagccctggaatggtgtccggcgttaaccaggcggcaatccgcgccagttgcgttaagcctaagctgctttcaatggaagaactgatcaccgccgtcagccccagcgcgtgcgccgcctgtacctgctcgcgtactttttccagactgcccgtgagcgtgggtttgataactaccgcgcgcacgccctcttcagccacaaaggcaaaatccggctcgcgcaggctttcatcccaggcaatggcaatgccggtttcacgggcaaacgctcggctatcatcgcgggttttgcacggctcttcgagaaacgcgatgcggtcgcgataatccgggttaacgtatttggcaaactgctgacctttcagcggtgtccaggcgcgatttgcgtcaagacgcaaatgcagatccggaattgcctccagcaacagattcaccaccatgccgtcgcgcaccgcttcgtacaatcccactttgaccttcgccactttctcgcctggcatatctgcaagtttgaggatcagatcgtccggatcgccattacacagcggtgccgcacggtagttggctgcttgcggcaacgtatctgtcagttctgccaatgcacagcttacgccaaaggccacggaaggcatctgcggtagctcgcaatcgcctgccagccagttatttacccaggcaagcagcacactttgcgcctcttcccaggtttcctgactgaagcccggcagtggggagatctccccccacccttcgcgctcgccttcacgcaggcaaacatacagcccgtcgcgggtttttaaccgcctgtcgcgcagaaccacccccgcgtccatggggatctgccagcggtatacctgcgcgctacgcattacggattccgtttgaatttgctgaagtcaggctgacgtttctggttgaaggcgttgcgaccttcctgaccttcttccgtcatgtagaacagcatggtggcgttgcccgccagctcctgcagccccgcctgcccgtcacagtcggcgttcagtgcagctttcaggcagcgcagcgccatcgggctgttttgcagcatttcgcggcaccaacggacggtttctttttccagatccgccagcggtaccacggtgttcacaaggcccatatccagcgcctgttttgcgtcgtactgacggcacaggaaccagatttcacgcgcttttttctgcccgacgatgcgagccatgtaggaagcgccccagccgccgtcgaaggaaccgactttcgggccagtctgaccgaagatggcattatctgccgcgatagtcaggtcgcacatcatgtgcagaacgtgaccgccgccgatggagtagccagccaccatcgcgacaaccggtttcggacaggtacggatctgacgctggaagtccagcacattcaggtgatgtacgccggaatcatctttatagccgccgtaatcaccacgcactttctggtcaccaccggagcagaacgctttatcgcctgcaccagtcagaatgatcacgccgatgttgtcgtcataacgcgcatctgccagcgcctggatcatctcttttaccgtcagaggacggaaggcattgcgcacctgcggacgattaatggtgatttttgcgataccgtcggtggatttttcataacgaatgtcctcgaaaccttcggagcagtcgtgccattcaaccggtgcgtaaagcattgcttcatcaggataaatcatattgtgtcctttagtcagaaacgcaagatctgcgccagacttgcgattacgccagcgggattttcccgatgcgcgttatgtccggcgcgaggaatgacatggcagtcggcagccagttccgccgccagggcgcggaatttgctgtcacgttcaccacataaataataaaacgcaaatgtgcgggcgctaaggttagcacgtaaatcaggctggacggcgagagaagtcgcctccagcatggcggcaagcgttgcgccattattgttgctgcgcagcgccaccagctcccggcgttgatcgtcattgagactggcaaaaacaggctgttgataccagtcggcaaataccgccgttaacggttctgtgagaaaacgctgcacccattggcgatcggaacgctgacgttccgcacgttgttcagcattttgcagccccggatgcccgccttcgacaataaccccacaaagccccgccagcccctggcaagccgccatcatcgccacccgtccaccaaggctgtaccccaccagccagaagtcaaggatgttgtaactaaccaaggttttacgcagtaagtcggtgacatcatcaaatccatcgacgctaatcgccgcgctaccaccgtgacctgggagatcaacatacaaccgactgtagtcggcaaacgcctcgcccacttcttgccattcgtggcaatcgccggaaaaaccgtgcaaaaacaccagccagggtaaacctggttttccgtgttttgcctgcgcgtgcaggatcataaatggcttacctgcgccagaagttgctggagcgtttgcgcaccatcggtgtcgttaaccaccatttcaatcaccgtggtggttggcgtgcgccaggcgtcggcaaatgccgtttcaagttcctgccagttttgcggacgatgatatttcagctcgaacatcgcggcggcgtgctcaaaatggacgttttgcggcatcagatagaaacgctcacgctcgctttgcggcgttggcaacaggctgaaaatttgcccgccgttgttgttcaccacaattaataccagcggcgcagaaacctgacgcaataacgccagcgcgttgagatcgtaaagtgcggagagatcgcccacaatcgccagcgtcggtttgccgcttgcccgctgaacgccggcggcggtgctaagcagcccgtcgataccgctggccccacggttgctgtacaccgggtaacctgccggaagttggctaagcgcatcaatcagacgtaccaccaggctgttaccaacaaacaattgcccctgttcaggcagatagtcgcagatgcgatgcgccagttgcgcttcgccaaacgcatcacggcgggcaataaccgcctgcattgcctgttccgccaggcgcgggatttcaacgcaccagggctggcgtttttctgccggatgcagctccagccagtcggcaatattggcaattaagcgacgtccgcgatggtgtgccggatcaagtcgcccttcaatgtcatcaacaatccagtactcttctggttcacagcttgcctgccattgcaggagccgtttccccgtcaggctgcttcccagttgcaccacaatttgcgcctgctgcagctcgctggtcgctttggcattgcctaaccaaagatcggcacacggcagcggctgcccggtttgactcagcacatcgccaatcagcggccagccaagagtttgcgcccacagggcaacttttttgccctcttccgcactcatgcgcccggcaaccaccacgccgcgcttttgtcgccagaagaaccagtcgcgctgtttttcactttccagacgaggcgcttcacgcagccacggtttgtcttcctgccaccagtcacccagacgctgttgccagctaagcccggtatcgtccatttcgccatacagcggttcagcaaacgggcagttgatatggactccccccgcatgaagcgtaccgagagcgtggtcgatggtagaaaccagccaacgtgcggggatatcctgggtcgggcgcggcaaactaatactgtgcgtggggtgagaggcgaacattcccggctggcgaattgcctgattcgcgccgcagtcaattagctccggcgggcgatcggcggttaagagaatcagtttttctccggttaacccggcttcaatcagtgccggatagagatttgccaccgccgtgccggaggtcacaatcaccgccaccggctgcttgctgactttcgccagccccagcgccagatgccccaacccacgctcatcgaaatgggtgtggtgaatgaatgcggaattctccgccgccgctaacgttaacggtgtagaacggctgcctggggcgatacagatgtgtctgacgccgtgacgcgttaatgcttccagaatgaccgccgcccagcgtcggttaaatgcgcttacactcatgagtttgtccggtatcaatattgcggctaagtataaggagctacaaaaatagattattgatatgaatcggtaatgatgcgactcattattattccatttgtaataaagtacgcagccctgccgctttgttgtcgatttcctgccactcttgctcggggtcggaaccacggacaatgcccgcgccagcatataatcgcacgacattgccgctaatttttgcactgcgcagggaaacgcagaattcgctttgttgtaaactgagatagcccgcagaaccggcgtaccattctcgggtgaacggttcgtgacgggcgataaactgtcgcgccagatcgcgcggtaagccagcaactgctgccgttggctgcaactgatgtaaacagatcacatcatccgctttgttgagactagtccagatacagcggcgaagatgctgcactttacgcagacgcagtacctgcggcggtaaaacatccagcgtctgggtatcggcctgtaatcgttgacagatatcttccaccaccagcatgttctcgcgctggtttttatcatccgccatcagccactctcctaactgctgcgcctgcttatcatcaggattatttgctactgttcccgccagcgcttcagtacgcagcgctttgtcacgccgccgccataaccgttccggactagagccaagaaaagcattttcgccatcaaaggccatgtaaaaatggtagcaattcagattcagtcgacgactggcagccatcatcgccgccgcgttgaccggacttgcgaaatgcaggtcagttgcccgagcgagcaccactttgtcgagctcaccttcggcgatggttttcgttgccagttcgattaattgcgtccagcccgttttgtccggccagtgttgttctcgcgtggtggttaaatgtaacccaggcaagggcttgatactcaccagtgtggcgataaattcttttgcctgaatcgcatcgtgctgaagggagctttcgctgaatagcgtcagccgcagcgtggctttaccgccacagcgtcgccattccaggcggggtaaaagtaaattgccctggctcgggtcaaaagcattcagcccccaaatgcgtaagtcggcgtgttccgggtgctggcgaagaaaacgttgtgcctggtccaagctcgtaaaacgggtaatcgcgcccaggacgacagcttcttcatcaccattacgttgttgccagtagaattgcgggtatgtttgctgactggccagccagctcaaggcatcaaaagcgtctttgagagggaaaggaatatcgataacccgaatgccgggtgtcgccggaatctcttggctcaaatggcgcagtagattttccagcgccgtagtaagactttgcacgcggacctctccctgttaaaagcctcacattatacggggtactacaaaaaaaatgcagtaccccggtgtagggaggttttaacggcgtgccagcaacagtcctagtaccagcccaacggccgcgcccacaccaattccttgccagggtttttcgtggacgtagtcatcagcacgataaactgcctgcttcgcccgatagtaataactgtcactagcctggctaacccgttttttcacatcatccagcgctttttctgcacgcgctttcagctcaacatatttctgatcggcgggatcgccagaggagcggagcacctcttccagtgtttcactaagcagcgtcaggtcgtcatcgatacgtgtatcaccaaactgattagacattctcgttctccatttgcgtaaaacctgtcactaactatagacaagggttgttgattacgcctgaattacctcgcgtgccatcccaatgtgtgggataccatcttcttcatagacctccgtcacagggataaaaccgaaactctggtagaagttttgcagatgcgcctgcgccccgaggtaaacaggcttatcaggccagtgatgcgtacatgtttcgagtgttttactcatcagctgctgccccactttttcgccacgcaacgcttcactgacaatcacccgacctataacgaccggctcaagatcatcatcacttttcagaatcctcgcatacgccaccagttcatcatttttccaaccgagaatatggcgattatcccccgtcaaatcatcaccatcgatatcctgataagggcaattctgctcgacaacaaacaccgcgcaacgcagttgtaataaggcataaagctgggaaacgcttaattcagagtgatgcagatcttgccattcaatcataatgctctccttttagatgtatgccttatactagccggaatattttttgaaacgtgatgaactcatggaattaatttttttaggtactagtgccggtgtgccaacccgcacgcgcaatgtcacggcaatattgcttaacctgcaacatccgacccagagcggactttggttgtttgactgcggtgaaggcacccagcatcagctactgcataccgcctttaaccctggaaaactggacaagatttttatcagtcaccttcatggcgatcatctttttggtttacccggcttgctgtgcagtcgttctatgagtggcattatccaacccttaacgatttatggtccgcaaggtatccgtgaatttgtggaaaccgcgctgcggattagcggcagttggaccgattatccgctggaaattgtcgaaattggcgctggcgaaattctcgatgatggcctgcgcaaagtaaccgcttatccgctggaacacccactggaatgttatggctatcgtattgaagaacatgataaaccgggtgcattaaatgcccaggcattaaaagctgctggcgtgccgcctggcccactgtttcaggaattaaaagcgggcaaaacaatcacgctggaagatggaaggcagattaacggcgcagattacttagctgctccagtgccaggtaaagcgctcgctattttcggcgataccggcccctgcgatgccgcacttgacctggctaaaggtgtcgatgtcatggtgcacgaagcgacgctggatataaccatggaagccaaagccaatagtcgcggccatagctctacacgccaggctgcgacactagcccgtgaggctggagtcggcaagctaatcattacccacgtcagcagccgctatgatgacaaaggttgtcagcacctgttacgtgaatgcaggagtattttcccggcgactgaactggcgaatgatttcaccgtgtttaacgtttaactctgcttattattaaaaacagggcgaaacttgccctgttatcgcaacccgcgctacatatatccacccacacaggcatattgagcgatttttgatatttattcatctccttacgcactatattcagagcaataagttgcctcttttcatcttgattcagcacaacctttgcaactaaaaggagcccatgatggttacagttgtcagcaattattgtcaattatctcaaacgcaactcagtcagacatttgcagaaaaatttactgtgaccgaggaattactgcagtctttaaaaaaaacagcgttatccggagatgaagaaagcattgagttactgcataatattgcgttaggttatgataaatttgggaaagaagctgaagatattctttaccatattgttagaaccccaacaaatgagaccctaagcattatccgacttatcaaaaatgcttgtttaaaattatataatctggcacatatcgcaaccaactcccccctcaaaagtcatgatagtgatgatctcctgttcaaaaaactattctcccctagcaaattaatgacaattatcggtgatgaaattcctcttatatctgaaaaacagagccttagtaaggtgcttttaaatgatgagaataatgaactgagtgatggtacaaacttctgggataaaaatcgtcaattaaccacagatgaaatagcttgctatcttcagaagatcgccgctaatgcaaaaaatactcaagtcaattatcctactggtctctacgtcccctactccaccagaactcacctggaagacgctctcaatgaaaatattaagagcgatccaagttggccgaatgaagtccagttattccccataaatactggcggacactggatattagttagcctacagaaaatagtaaataaaaaaaataataaactacaaataaaatgcgtcatattcaacagtttgcgtgcactaggctatgataaagaaaatagtcttaagcgtgtcattaatagttttaattctgaactcatgggagaaatgagcaataataatataaaagttcatttaaatgaaccagagataatatttttacatgccgatcttcagcaatacttaagccaaagttgcggtgcatttgtgtgcatggcagcccaggaagtgattgaacaaagggaaagcaattctgacagcgccccctatacgttattaaaaaaccatgctgacagatttaaaaaatatagtgcagaagagcagtacgaaattgattttcaacatcgactggcaaacagaaattgttatttagataaatatggcgatgcaaatatcaatcattattatagaaacttagaaataaaacacagtcaacccaaaaatagagcatccggcaaaagagtgagttaacatcattgttaattaattcgaccagtcagcaaatatgctgactggtcgaacatagtttgctaaacagtcatcactgactgatgtcagtcacaccatccgccagttcaatcaggcgaataaattccgccctgtaaccctgtggatcttccccttttgcctgctgagcccactgtttgatctgctgccaggaggtattgttcaggtattcagaaccgcgtaacttttgcccatatgcagctactgctgcgcgaaaacgcatatcttcagagggcgcgtttattgttggccccagcgggaattcaactaactgactttcttttccctgcgggtatttccagcgaatttttaaccaggccagttctttcgttttgtcgcttttcgctaatttgttatccggggcatagcgtaacttatcaatacttgctttttgcccgttcagcgttaattcgaataacaacgttatatgtttgcctgcgcctatatcccctgcatcaacgttgtcgttattaaaatgttccacccgaagttggcgcttttcataaccaatctgacggtattccgttacccacgcggggttaaactcaatttgcgctttgacatcttttgctacggtaatcaacatctgccgcatttcactattcaatactttctgcgcttcagagagggtatcaatgtagctgtagttgccgttaccaacatcggcaattcgcaccatcattgcctcgttgtaattgctattccccacgccaaacgtgctcagagtaacaccagactcccgctgttttttgaccatactttcaatgctttttggatcgtcaatgccaacgttaaagtcaccgtcagtggctaataaaatgcgattgatgccgcccttaataaaccccttcgtcgcctgctgataagccagttccagcccggcaccgccattggtactgccttcggcatccaggctatcaattgcggcattaatttccgccttatgactcccggagatagaaggcaatgcaatacgggagtcgccagcgtaggtcacgatggcaatgttatcctgctcacgaagttctttgaccaataatttcaagctagactggataagtggcaaacgttcatcagaaatcatactaccagaagtgtcgataagaaagaccagattagaagctggtaactcttcacttttgcgatctttcgccaggatatcaactttcagcaatgttcgctgttcattccatggtgcaggtgccaattcgtagcgcatagcgaaaggtattggcttagaggccggaatagattgtttgtctttgatatcccaatcagacgggaaataattgactatctcctccacccgcacagcgtctggcggaggtaacagcccttgattgaggaaacgccttacattcgcataactgccagtgtcaacgtcaagactaaacgtcgccaacggattttgcgctacctgcttaaccggattatcatcgaactgctggtagcgagcggttcctggatttgcgatatgtgtagcttttgctttagccgctcttgcaaatgttggcgcttcctgcaatcgcccctgtaaagcctgtttgtcactatattgttgcacttcttgctgggccaaggctttcgcggcggcggcgctttgctcagcctcttttattgcagcttgctgcgcggcaagcacttgctgctctgtgggagtactgggttgttgttgctgactttccttattctcaggttgcggcccacatccactcaaaatcaaactactcataagcaacatgattatatttttatttcgcatataaaatccttttaaataaactcaggcaccagacataaaatatactctttgtataatcctgctaatcttaataaaatacaatatcgaaacccatagcaaataatgattcaacaacgcaacccattaataatttgcatatgaaaaaaataatctttgcttttattatattatttgtgtttttactccctatgattattttttaccaaccctgggtcaatgcattaccgagtacgccccgacacgcaagtcctgagcaattagaaaaaacagttcgttatcttacacaaactgtgcatccacgtagtgccgacaatattgataatctgaataggtccgcagaatatataaaagaggtctttgtcagtagcggtgccagagttaccagccaggacgtccccattacgggtggcccctacaaaaacattgttgctgattatggtcctgccgatggaccgctgattattattggtgcgcattatgactctgccagcagttatgaaaacgatcaattgacctatacgccgggcgcggatgataacgccagcggtgtggcaggattactcgaactggcacgtttgttacatcagcaagtaccgaaaacaggcgtgcagctggtcgcctatgcgagcgaagaaccgcccttctttcgtagcgatgaaatggggagcgcggtgcatgcagctagccttgagcgtccagtgaaattaatgatagcactggagatgattggctattacgactctgcgcctggaagccagaattacccttacccggcaatgtcctggctttatcccgatcggggagactttattgccgtggtcggcagaatacaggatatcaacgccgttcgtcaggtaaaagcggcattgttgagttctcaggatttatctgtttattctatgaataccccagggtttattcccggtattgatttctctgaccacctgaattattggcaacacgatattcccgccataatgattactgacaccgctttttatcgtaataaacaataccacttgcccggtgataccgcagacagattgaattatcagaaaatggctcaggtagtggatggtgttataactttgttatacaacagtaaataataaaaatttctcgaggcgggtccagaaaaagcgacatgcacattttattttccctcatctgttttaagatgcgaaacatgaaattcaacggaggaaaaataaatgggaatgattggctattttgcagaaattgacagtgaaaagattaaccaactgcttgagtctactgaaaaacctttgatggataatatacatgacacgcttagtggattacgccgactggatattgataaacgctgggattttttacactttgggctgacaggcacctctgcttttgatcccgcgaagaatgatccgctgagtcgtgccgtgcttggtgaacacagcctcgaagatggcatagatggcttccttggattgacctggaatcaggagttagccgcgacaatcgaccgactggaaagtctggatcgaaatgaactgcgtaaacagttttccattaagcgactcaatgaaatggagatttatccgggagtgacctttagtgaagagttagaggggcaactctttgccagcatcatgcttgatatggaaaagctgattagcgcgtatcgacgtatgctgcgacaagggaatcatgcgctgacggttattgttgggtgatatagcttgatgcctgggggagaaagacccattagttaagatttacgccaggatcatcttgaaaaaatctttaaccatggtccggtttttatccccttgtataaatattactaaatgcttgcttagtcgcattgttaaatgcaataccgtatattcggtatgtaacagcgatatcctctgtgctggcaacgatctgtcatgcttgatgaaaacggaattgaacctgtcattaccaggtagataaaaagcctgttcaattttgggattattttttataactcgtgtctgttatggcgacacgggaaaacatcaatattgtccttcacaaattgcagtaatatagaatcaacctctcttgcaagttggtcacaatgtattataagcattttgaatatgtcatcctctgtaatctcgtgaaaattttcggccttgtcttttagctcatcatatcggattcttgcagtaaccattttttgggcgagttctaataaccccaaagcttgcaattgctggtgagtatgatcactttcaaaaaatatcccacactccattccttcccaaccaacatattcatgccattcataaaccagcataaatgtttgtaaaactggcggtaataattggatatctgcaaaaccaaaccaaaacttacgcttgagatcccactcatattcaatcgccaatgctatattgtttaaggcatctccggcatccttatttttacgcaaaatcaattccgtcagtgtatagcgttgttcatcaatacgccgaagagcttctgcaatatcatagtttgtagccaacaaaacattctctgcttcctgatgagtgacgtctgcttttgccgtcaatatattgatttggtcaatatgaaacaacttgatggcttcatcaacatcaccgccagtcctctctaacaaacgtctggcaacctggataccgacaggtacgttcttccgaagtttacgaatttcacttaaccattccatgtcaaacccctttaaatatttatgatattaaatataacaacgtctggataacgacccggcctgactgaatatctcacgttttcctgcttaacattcatgttatgatgctcttgaaactaataatacgtatggaattgtcactatttatctgctaatgaatagtaacaatgtcattcgtttgatgaatatattatttcagggaataattatgacacctttagaacgcattacccaacttgttaatatcaatggtgatgttaataatcctgatactcctcgtccattgttatctcttgaggatttttttattgacaataatatccatggtagtatatgttgcaatgtgattccagaacaatctccgcaagctatctatcaccattttctgaaaatacgtgagcgtaacaatgttagtgatgttttggtagaaattacgatgttcgatgacccagactggccctttagtgaaagtattttagttatcaccactgctagtccagaagaagttcagagctggtttgtagaagaaattgcccctgatgagtgctgggaaggatggagtgaagatacggagcatggatgggttgaagtccctgtgggtatgcatccggttacttgttggtgggattaaaacatttatataaacagataagcggatgtttacataaatttttatgtgaaggaacatgatgaaacttattcctcgcagtagtgatattagtcctggcattgatggaatttgcccggggccttttcctccgaacggatttaccgtacttacagatgcagcatatggtaacggagactgtttcggtttgtactggcctattggtcaggagcataaactacctatagtgtgcgaaacgtaccatgacgaatggcgaatcgtacctgccttttccagcattaagaagttcgaagaatggctggaagtgaatgatgatgatccccatgaaaatggcatcagcatcgaagatcaagactttgcagcaaatctcttccgtgttgctcggaaatgtcttagtacgggaaggcttgatgacgcactgccactgttacagcgagcaacagaacaattgcctgaagtcagcgaatattggttagcactggcaatccagtatcgccgatgtaaaaaaacagaagctgcagcacaggctgcgcttaatgcttatcttggcaattgggcatttggtgttcctgacaataaagtcattcatttgctgagtcaggccgcagatgtcccgaatttccaggatgatcctgtgattcagtgcattaaagaacaaggattagatcttagctttggaggaacaaaggaaaataataattaccccttgatgcagatgtgtgttgatacttattttgcgcagagaaaaccgcttcaggcattaaccctgttacataattatgcctggataatgtccagtgaaacgactgcatttcaggaacgctatgattttaatatcgatgaatggcgggcaaaattcaggcagttatgtttagagtattttggcgatagtcgtacacagttcacttaacgctctgcgtctatctactatcccttctttttcagaaaaaccgccgagcatgtcggcggctttctgacttacaaagtaacagattacatcagcggcattgccaaacgcacaatgctaatcagcggttgtggccatacacccagcaccagtaccaacagtgcagagatcagcacaacgataccgcccgcgctgtactgccagttacttggtgcatcgcgacccggttgttccggggcgtgaagatacaggctcaccgccacgcgcaggtagtagtagaggccgattgcgctaccgacaaccacggcacccaccagccaccacaagtgtgcctggacaccgaccgccagcacgtagaacttaccgataaagcccagcgtcatcgggataccggccagagacagcatcatcaccgtcatcactgccgcgaggatcggacgatgccagaacagaccgcggtaagagaacagggaatcagcatccgggccacgatacgggctggacatcaggctgaccacgccgaacgcgccgaggctgctgaacagataaccggccaggtaaacccctaccgcttccatgctcatctcgccggtttgcagcgcaatcagcgctaccagcagatagccgaggtgagagatagaactgtaaccgagcagacgtttgatattggtctggctcagcgccatcaggttaccgaagatgatggaggcaaaggcgataatcgccagcaccacgcgaatcgcttcgctgtcacccaccggtgcgtagaggaacagacgcatcaccacaccgaagatagcgattttgctcgccgtcgccaggaaagtggaaaccggcgcaggcgcgccctggtatacgtctggcgtccacaggtggaacggcaccagagagagtttgaagccgaggccaacaatcatcaggccgaaacctgccagcaacagcggctcgttgagcataccgtcgccaaggtttttacccaacgcgacaaagctcaggtcgccagactgcgcatacaccagcgccataccaaacagcaggaaagaagacgctgcggcagaaaggatggtgtatttgatactggcttccagactacgtttctggcggaaagcgtaaccgaccaggccaaacagcggcaaagagatcagttcgataccgaggaacagagacgccagatggttggcattcgccagcaggatcccgcccagcgcggcaattaacaccaacaggtagaactcatccttgttgtcgttatagccttcaagccacgggtaggcgaaagtacaggtggcgaggctcgccaacaataccagcccggtgtaaagcatggcgaaaccatcaacgcgcatcagcggcgtaacgtccatagcgcccgcctggccaacaaaccagagcgaaaccagcgccgcgttaagcccaataaccgagagcgtagcgttgaggaaatgattgcgtcgccacgcaatggagagcatcacaaccaccaccgtcaagccgacgatcagcaacggtagcagtgcgatcaggttttgtggagttattgtcatggcgatttacggccttgtagtagtaacggaattaacaaaccactgctggatattgccaatcgcggagtggctggtatccagaatcggctgcggatagaagcccagcagtaccagcagcaccaccagcaacaggatcataaacagctcacgcaggctcatccctggcagttcctggctggcaatctggcttttcgctttaccgaagtaagcgcgatgtaacatcgccaggctataaacagatgcaaagaccagcccaaaggtagagataacggtaatcaccggtacaacctggaagctgccgaacagaatcataaattcgccgacgaagttaccggtgccaggcatcccaagcgttgccaccgcaaagaacaggctcagtgctggcagccatttcatcttgctccacagaccgcccatcatgcgcatgtcgcgggtatggatacgttcataaagctgaccacaaagaataaacagacccgccgcgctcaaaccgtgcgcaatcatctggattaccgcgccctggtaggccaactggctgccggtgtagatagcaatcagcacgaagcccatgtgggaaacgctggtgtaggcgatcagacgtttgatatcggtctgggcgaaggccatccacgcaccgtagaagatgccgataacacccagccacatagcaattggcgcgaactctgcgctcgcgttcgggaacagcggcagggagaaacgcagcaaaccgtaagcggcagttttcagcaagatccccgcgaggtcaacggaaccggcggtcggagcctgggagtgcgcatccggcagccagccatgcagcggaaccaccggcattttgactgcgaaggcgatgaagaagcccagcattaacaggtattccacaccactggacattggcgtattcagcagctcttcatagttgaaggtccagacgccggtcgcattgtagtgaacaaaaaccagcgccaggatggcaatcaacatcaccaggccactcgcctgggtgtaaatgaagaacttggttgccgccgtgatacgcgttttaccgtcagaggctttatgcccccacagtgcgatcaggaagtacatcggcaccagcatcatttcccagaagaagaagaacaggaacatgtcgatggcaaggaacacgccgataacgccgcccaggatccacatcaggttgaggtggaagaagccctgatatttttcgatctctttccagctacatagtaccgccagcacaccgagcagaccggtcagcacgaccatcagcaggctcagcccgtcaatggcgagatgaatagagataccaaaacgcgggatccacggcatgtcgaattcagactgccactgcggaattccggcggattgcgtcagactataaccgccctgcaaccacagttgcaggctcagcgccagcgtcaatcccatggtgatcagcgcgatccagcgtggcaccttgacgccaaagcgttcggtctgccagcacaggaagccgccaataaagggaattaatattagccagggtagtaacatggcgatctttattccttgtaaaagtcccgtcaggaccggattttcaacgaattctcacgacagaaaattctcttcggactgggggtagtgtcggatgcaccgcgaaggcggcttatccgacctacgttcttatatgcccaggggcaatcccacaatccttaactcaacgcagtaccatcaacagtgccagcaccacgaccgcaccgatgctcatggatgccacataccagcgcagatagccgttctcacttaacagcagacctttacctgcaaagcgggaaaggacagccgggatgttcatcatactgttcagcggatcgcgtttcagcaaccaggcaatacccaggaacggcttgacgaacactttgtcatacagccagtcaaatccccaggcgttgtaccaccaggtgcccagcagacggcccggcgcactgttggcgatggaggtcaccagagtacgtttacccagccacagccaggctgccagcagaatgccgaccaccgcgaccacgccagaggtaatttccagggtcaacatgctgccgtgcgccagttccgtcgtttgcggaagcacgccctgcagcggcggtacaatcagtgcgccaacgaaggtggaaaggatcagcagcacaatcagcggcaggctgtgagttacccctttcacggcgtgagcgtgaatttgttcttttccgtggaagacgatgaaaatcatacggaaggtgtagaggctggtcataaacgcaccgaccagacctgccaccatcagattgatatgaccattcgccatcgcacccgcgaggatctcatccttactgaagaagcccgcagtgaccagcggtagtgcgctcagtgctgcgccgcccaccaggaagcagagataaaccagcggaatagatttacgcagaccgcccatcttgaagatgttctgttcgtgatggcaggccagaatgacggaaccggatgccaggaacagcagcgctttaaagaacgcgtgggtcatcaagtggaaaatcgccgcatcccatgcctgcacgccaagcgcgaggaacatgtagccaatctggctcatggtagagtaagcgagaacacgtttgatgtcggtctgtaccagcgcggcaaaaccggccagcagcagcgtaaccgccccgacaatacccaccagatgcagaacttccggcgtcatcaggaacaggccgtgggtacgggcgatcaggtagacacccgcggttaccatggttgcggcgtggatcagcgcggagacaggcgtcgggcccgccatcgcgtcggcaagccatgtctgcaacggcaactgcgcagatttaccgaccgcaccgcccagcagcatcagcgtcgcccacatcagcatgttattgccgtcagcaaagtgcgctggtgccagttccaccatttcgcggaagttcagggtgcccagttcgttgtaaagaatgaacagtgcgaaagcgaggaacacgtcacccacacgggtcacgacgaacgctttcattgccgctgcgccattcttcggatcggtgtaatagaacccgatcagcagataggagcacaggcccacgccttcccagccgaggtacatcagcagcaggttgtcggcaagcaccagaaccaccatgctggcgatgaacaggttggtgtaagcgaagaagcgagagtagccctcttcaccgcgcatataccaggaggcgtacatgtgaataaggaaacccacaccagtgaccacgctgagcatggtcaggctcaggccgtccagcaccaggttaaaaccgatgttaaagtcgcctacgctcatccacgtccacagcggctggctgtatgtctgctcgccgttagcgaagaaatcaacgccgataaaggcggttaccagcgccgccaggcccacagagcctacgccgacgatcgcgctgacgttttcagaccagcgcccacgggagaatgccagcaggacgaagccaatcaatggcaaaataatggttaaggcaagcatgttcatccgcgcatctcacttacactatcgatgttcaggttctggcgacgacggtgaagttgcagcagcagcgcaaggccgatactcgcttctgccgccgcgaggctgatggcgagaatgtacatcacctgaccgtcggtctggccccagtagcttccggcgaccacgaaggccagcgcggaggcgttaatcatgatttccagaccaatcaacataaacagcagattgcgacggataaccagaccggttaagccaagaacgaataagattgccgcgaggatcagtccatgttgtaaggggatcatgcgtgctcctccgtttttcttttcgcgctgtcgtctttacgattgctcagcacttcacccgcacgctcttcacgaccgacgtggaaggccacaaccagacctgcgagcagtagcatagaagccagttccaccgccagtacgtaaggcccgaacagcgtaatacccactgctttagcactgattggcgtaccgtcgataccctgatcgttaacaccgaggatggcgtaaacaatcaccaccagcatgatggcgctcaaaattgccggaccaatccacacctgcggtttcagccactggcgttcctgttcgatttcactaccgcccaggttgagcatcatcaccacgaacacgaacagcaccataatggcacccgcgtagacgataatttccagcgcaccggcgaagtaagcgcccagactgaagaacaccccggaaatcgccagcaggctaataatcaggtacagcagtgcgtgtaccggattggtatgggtgatcactcgcaaggtcgcaagtatggctatcaggccacagatataaaaagcgaactccattgcccctctccttacggtaacaggctcttgacgtcgataggcttggcttcgttctctgcttcgcccttatctttgccgtcgattgccatacctgccatccggtagaagttatattccgggtatttgcccggaccggagatcagcagatcctctttctcgtaaaccagatcctggcgcttgtattcccccatttcgaaatccggggttaactgaatcgccgtggtcggacaggcttcttcgcacagaccacagaaaatgcagcgactgaagttgatgcggaaaaattccgggtaccagcgaccgtctttggtttctgctttttgcaggctgatacagccgaccgggcaggctaccgcgcagaggttacaggctacgcaacgctcttcgccgtccgggtcgcgggtcagaacgatacgaccacgataacggggcggcagatagaccggctcttccgggtacattcgcgtttcgcgtttggcgaacgcgtgcaggccgatcatccagatactacgaacctgggtgccgaaacctactaacaattcttttaaggtcatggtcttattgccccttattgcgcctgccagagaatgacagccgccgttaccagcaagttgatcagcgtcagcggcaggcagattttccagccgaaggacattacctggtcataacgcggacgcggtaagctcgcacgaatcaaaatgaacatcatcataaagaacgcggttttcagcgcgaaccagatgaatggcggtaacaacgggccttgccagccaccgaagaacagcgtcaccatcaatgcagagatggtcacaatcccgatgtactcacccacgaagaacagaccgaacttcataccggaatattcaatgtggtaaccatccgccagttcctgctcggcttccggctggtcaaacgggtgacggtgacataccgccacgcccgcgatggcaaaggtaataaaaccaaagaattgcgggataacgttccacacatgcgcctggctgttgacgatgtcggtcatgttgaaactaccggcctgcgccaccacgcccatcaaggaaagcccgaggaacacttcgtagctcagggtctgcgcagaagcacgcatcgcacccagcaagctgtatttgttgttactactccagcccgcaaacagcaccgcgtaaaccgccagacctgccatcatcaggaagaacaaaatcccgatgttcaggtcggcaaccacccaacccggactgactggcacaatcgcaaaggccagcagcaggctggtaaaggcaatcatcggtgccagggtaaagatgacgcgatcgctgaatttcgggatccagtcttctttaaagaacattttgatcatgtccgcaaccagctggaggctaccgccccagccaacacggttaggtccgtaacggttctggaacagacccagcaggcgacgttcgccaaagctcatgaatgccccgcaggtgacaaccaccagcaggatcaccaccgctttgaggatggtcagcaggatctcaatcagttccggacttatccaactcattgttgtgcctccttgagatcctcaagatgcgcgccagccagcaccggagcaatgccggacatacccatcggcaagcccacctgccctgccgtcagtccttcggcgatttcaaccggcagcgtgaccgtgttgccatcgtaactaaaggagacgcgtgtacctgcgttcacacccaacttcgcggcatccgctgggttgagtttgatgtacggctgcggcatacggctctggaagaccggagcacgctgactcaattcatcgctgccaaacaggtggtaatacggcgcgatacgccatttcccgtcctgcggctggaagcgtgccggtacgctggtgaagtaatccagaccattttcgctggtttcaaacagacgcacgcccggatcgccaaagcgcagtttgccgcccacttcgtcctggaatttgttccacgcctgcggggagttccagcccggcgcccaggcaaacggcacttggctacggtgcgcagtcggctggttgttaccttccatgctgaaggtgaacatggtgtcaatatcctgcggctgacgcggctcatgaacgctgatattggcgcgcatggcggtacgaccgctgtaacggtgcggttcacgggccagtttctgcccacgaatacggaatgtcgcatccggcgcagcatctttgatacctgccagttccgggattttcgccacaacagcgtcaatcacatggtcgagctgcgtccagtccacttcacggctcagcagggtgctgtgcaggctgtgtaaccagcgccagctttccagcatgacagttttgctgtcgtaataagcaggatcgtaaacctggaagaaacgttgggcgcggccttcgttgttgatcaccgtaccgtcgctttcagcaaagctggcagcagaaagtaccagatgggcgttttccataatcgctgtgcgttgatgatcaaccaccatcaccagcggtgctttagccagcgcagcattcacgcggatagcagaagcgtgacgatgcagatcgttttccaacaccaccaccgcgtcggcgcgtccggtttccagttcggttaacgcttcttcaaggctaccgccacccataatgcccagccccatgctgttgacggaacgggcaatcatggtgataccgacgtcagcgccgcgacctttcagggctttcgcgacgttagccgccgcctgaatcacctctaagctaccggcgttcgtcccggagataatcaacggtttcttcgcacctgccagtgcctgcacgatgacgtcgattttgctttgcagctcaggttcgataccgtcaaccgctggtgcagagttatccagcgcatgggcgatggcaaaacctaaacgcgcctgatcttcaaccggtgcgcggtaagtccacgccgcgatatcatccagacgggtgtcatcaacgttggtaacaaacagcggatgcttcgcacgttgaccgatgttgaggattgccgcaatctgccagtcagccactttctgtgctgccgccatttcgcgcgctttacctttcacagcctgacgcactgccagcgcgacgcgcgcgccggtctgggtaacgtcttcgcccagcaccagtaccgcatcgtaagattcgatttcgcgcagagccggagtataaatgccgccttcacgcagcactttcagcgccagttgcagacgttcctgctcaccgtgagcgataccggtgtagaagttttcttcgcccaccagttcacgcagcgcaaagttgctttccacgctggcacgcggagaaccaataccgatcactttcttgctctgacgcagaatatctgccgcgccctgcattgcctgttcggcgttgagggtaatgaaatcatcgccacgacgctgtactggctgacgcggacgatccttcaggttgacgtaaccgtaaccgaaacgaccacggtcgcagaggaagtagtggtttaccgtaccgttgtaacggttttcgatacgacgcagttcgccgtaacgttcaccggggctgatgttacagccgatggaacattgctggcagatgctcggcgcaaactgcatatcccatttacggttgtaacgctcggagtgcgttttgtcggtaaatacgccggtcgggcaaatttcgaccaggttaccggaaaattcgctttccagcgtgccgtcttccgggcgaccgaagtagacgttgtcgtgcgcaccgtaaacgcccagatctgtaccgtcagcgtaatctttgtagtaacgcacacagcggtagcaggcgatgcagcggttcatttcgtgagagatgaatggccccaaatcctgattacggtgggtacgtttggtgaaacggtagcgacggaagctgtgtccggtcatcacaatcatatcctgaagatggcagttaccgccctcttcacataccggacagtcgtgcgggtggttggtcatcaaccactcgaccacgctttcacggaactgtttcgcttcttcgtcgtcaatggaaataaaggtgccatcggaagccggtgtcatacaagacatcaccaggcgaccacgcgtgtcttccgcgttttggtattgcttcaccgcacactggcggcaagcaccgacacttcccagcgccggatgccagcaaaagtaaggaatatcaaggcccagagacagacaagcttccagcaggttgtccgctccgttgacctcgtattctttgccgtctacatgaattgtagccattagcatgcttccagttttctcagtcagagactgagcgttaatcgaaattcggttaccagcgctctttcagcaggttcggctgaatcccattaatcaaatgggtattgctgaacggctgtttgattcccgcctcaaattcttcgcggaaatatttgatggcgctctgtaacggctccactgcaccaggtgcgtgggcacagaaagttttacccgggcctaagaatcgacacagttgctcaagtgtttcgatatcgcccggctgaccttcaccacgctccagcgcacgcagaattttcacgctccacggcagaccgtcgcggcacggcgtacaccagccgcaggactcacgggcgaaaaactcttccaggttacgcaccaggctcaccatgttgatctcatggtcaaccgccatcgccagcgccgtacccagacggctgcccgctttaccgatactttcgaattccatcggcagatcaaggtgcgcttcggtcaggaagtcagtccccgcgccgcctggctgccaggctttaaatttcagaccatcacgcataccaccggcgtaatcttcgaggatctcgcgtgcggtggtgccgaacggcagttcccacagtcccggatttttcacccgaccggagaagcccatcagcttggtgccagcatctttacttttgctgatgttctgataccactccacgccgttagcgaggatcgccggaacgttacacagggtttcgacgttgttgacacaggtcggtttaccccatgcgccggaggttgccgggaagggtggcttgctgcgtgggttagcacgacgtccttccagggagttgattaacgctgtttcttccccgcagatgtagcgccctgccccggtatggacgaacagttcgaaatcgaaacctgttcccataatgtttttgccaagcagacccgcttcggtggcttcggcaatggcacggcgcagattaactgccgcttcgatatattcgccacgcaggaagatgtagccacggtaagctttcagcgcaaacgcggagatgagcataccttccaccagcaggtgcggcagttgctccatcaacaggcggtctttataggtgcccggctccatttcatcggcattacacagcaggtaacggatgttcatggattcgtctttcggcatcaggctccatttcaggccagtgctgaagcccgcgccgccgcgccctttcagaccagcgtcttttacctgattaacgatttcgtccggagacagcccggtcagcgccttacgcgcgccttcgtaaccgtttttgctgcggtattcgtccagccacactggctgtttgtcatcgcgcagacgccaggtcagcggatgcgtttcgggagtacggataatgtttttcatttataccgctccagcagttcagggatcgcttccggggtcagatgcgcgtgagtgtcctcatcgatcatcatgtttggccctttatcacagttccccaggcagcaagttggcagcagcgtaaagcggccatcaaatgtcgtttgccctggtttgatgttcagctttttctcgagcgccgcctgaataccctgataaccgttgatatgacagaccacgctgtcacaataacggatcacatggcgaccaaccggctggcggaagatctgactgtagaacgttgccacaccttcgacgtcgcttgccggaatacccagcacatcggcgatcgtgtggatcgcaccatccggcacccagccacgctgcttctgaacgattttcagcgcttcaatggacgccgcacgcgggtcttcgtagtggtgcatctcgtgctcgatcgcttcacgctctgccgcactcagctcaaaagcctcggtttgtggttgttgattctcgtgcataattagcggtccacatcactcataacaaaatcgatactgcccagataaacaatcaggtcagacaccaggctgccgcggatcgccgccggaatttgctgcaaatgcgcaaagctcggggtacgaacacgggtgcggtaactcatggtgctgccgtcgctggtcaggtagtaactgttgatccctttggtcgcctcaatcatctggaaagattcattggcaggcatcaccggaccccagctcacttgcaggaagtgggtgatcagggtttcgatatgttgcagcgtgcgctctttcggcggcggcgtggtcagcgggtgatccgctttgaacgggccttccggcatgttgttgaggcactgctcaagaatgcgcagactctggcgcagctcttccactttaagcattacgcgggtgtagcagtcagaaacgccaccacccaccgggatttcaaagtcgaagttttcatagccagaataaggacgcgccttacgcacgtcgaagtcgatcccggtagcacgcaggcccgcgccagtggtgccccactccagcgcctctttcgcgccataggcggcaacgccctgggaacgacctttcagaatggtgttttgcagcgccgctttctcgtaagacgccagacgtttcggcatccagtcgaggaactcacgcagcaggcgatcccagccgcgcggcaggtcgtgcgctacgccgccaatacggaaccacgccgggtgcatacggaaaccagtgattgcttccaccagatcgtaaattttctgacgatcggtaaaggcgaagaacactggcgtcattgcgccgacgtcctgaataaaggtgctgatatacagcaggtgactgttgatgcggaacagttcggagagcataacgcgaatgacgttaacgcgatccggcacggtgatcccggccagtttctctaccgccagcacgtaaggcatttcgttaacgcagccgccgaggtattcgatacggtcagtatacggaatgtagctgtgccaggactggcgttcgcccattttctccgcaccacggtggtggtaaccgatgtctggtacgcagtcgacaatctcttcgccatcgagttgcaaaacgatacggaaagccccgtgcgcgctcgggtggttcggaccgaggttgaggaacatgaagtcctcgttttcggtgccgcgcttcatcccccactcttccggtttgaaggtcagggcttccatctccagatcctgtttggctttggtcagctcaaacgggctgaattcggtagcgcgcgccggataatctttacgcagcgggtgacctttccaggtttgcggcatcatgatgcgtcgcaggttcgggtgaccgtcgaaagtaatgccaaacagatcccaggtttcacgctcataccagttagcgttcgggaacagtttggtgaaggtcggtacgtgcaggtcgttttctgccagcgccaccttcagcatgatgtcgcggttacgatcgatagaaatcagatggtagaaaacggaaaaatccgcggcaggtaacccttcgcggtgtgtgcgcagacgttcgtccatgccgtgtaagtcaaacagcatgacgtaaggtttcggcagtttctttaagaaatcgccaacttccagtaattgttcacgcttgatccacacaacgggaaccccggtgcgagtcgcctgaacagtaaaggcatccggcccaaaacggttgcgcagttcgccaatcaccggatcatcaagatgatcgcgggtctgccaggcgggttcttgcgcggttaagtcggtcatattgttcaccattgcaaatggtccgtggtgactgtcggcgcagtaagcttcgcgaaatagatttaggaataagcgaagaaaaatccctttgccgacaggcgcaaattaaatctcgtcaggtgtacgcaggttagttacggcaatgcgttcaccgcgcttgcgttcgcgctcactttgcatattggcgcgataaacgccctgatcgccaaccacccaggagagcggacgacgttctttgccgatagattcctgcaacagcatcagtgcctgcatgtacgcttcaggacgcggcgggcagcccgggatatacacatcaaccgggatgaatttatcgacgccctgcacaacggaataaatatcgtacataccaccagagttggcacaggcacccatactgataacccattttggttccagcatctggtcatacagacgctgaataaccggtgccattttggtaaagcaggttcctgcaaccaccatcaggtcagcctgacgcgggctagcacgcaatacttctgcgccaaaacgcgccacgtcatgcaccgcggtaaagctagtcaccatctcaacgtaacagcaggaaagaccgaagttatacggccaaatactgtttttacgaccccagttaaccatgtcattgagcttgcccataaacacgtttttgttaacttcttgctccagagggtcggttacgatctcctgcttttgcagggggtaacggtcgttctcaccgttgggatctatgcgggtgagcgtataatccatcttaatgcctcgcggttagcgttgacgattagcgatactgttcgtttccgggttcatacgctcgcggcgactacgcgcgggcgtccagtccagcgcgccaatacgcaccagataaaccagacctgccagtaacacaaaaataaaaattgcagcttccacaaagcctacccagccgctttcgcggatagaggtactccatgcgaacagatacagcgcttcaacgtcgaagataacgaagaacatggccaccagataaaacttggcggacaggcgtaagcgggcggagccgacgctgtcgataccggattcaaacggcacgtttttgctcctcgcgcgtgcgcgaccgcctaaaaaccaaccgcctaccagcatcaggcaacacaggccaatggcaacgataagaaagatagcgaatgcccagtgatgagcgatgacttcagtggatgtactcatactcattgcttactcatcaaaagtagcgccagattcactgctcttcacggcagatggacgccacatcgattcatggggaggaataaaaaaaaccttacaatcactgtagaaattcttttatacagctaattgatgtggttttttactcctttctataaccttttgtcaactttaacaaaagtttcttcacattagtttacataatatcaacaccattagcatttaatgccctttcaccccagatccttgacgactccaggataattagatgttgttgaatcgtgtccgttgtgaagcaatggaaaaaatacgggtctattttgacaggaatttgtgtcgattcctccccccaaaagagagtattttcttgatctgtgacacgcttttgtcattccataacaaaaacgcagcaacaaatttacgtattttttaacatcattgtagcaggtgatttttttcaggcgattatttgtgcgttcgggacgtgaatctctggtggttgaaaaatgaacagttttgtacgttctgcactatgcgatgaaggatttttactaaaaaaaagccgctggggtttaaaacacccccagcggctcgttttttacactattgtctcaggaattatctatcgtccgtcgattactcgatatccctttcaatcaacaaactatcatccccttccggagcagacattgggctgtattgccacggattatggtagctctccatcgcctgatagatcacctgggccagctcattattactggacggatcatagcacagcaaatattcggtatcaggtagcggcggtaagccatctactccactcagcacacgcaggtccgggctcatcatctcaaccggccttgccgtcacgccaagaccggctttcactgccgcacgaacggccggaagcgtgctggcgacataagccagtcgccatggaatatctgctttattaagcgtcgccagcaccatatcgcgaaacgggctaggatcatccagcaatacaagagggatcggctcgcctttttgcaatatgtattccgctgcgcagtaccagtgtgttgggctggtacgcaggttcaatgccttaaacgcactaggacgatgggtggttaccatcaaatccacttcctgggattccagcatttctgccatataggcattacgtttaacgcggacatccagcgctaatttcggataaacgctactcacgcgatttaacaggaaaggtaagatcgtatcggcagattcatcactagcaccgatagttaatacgccctgaagattactgaacattaaactactgcaggcctcatcattaaaacgcaggattttcctggcgtaaccaagaagttgaatgccatgttcagttaacagtttgttgcgaccgtgacgagcgaacagttctttcccaacgagttgttccagacgctgcatttgctgacttacggcggactgagtacgacacacagcggcagctgcggcagcaaaagtgttcagatcggcaacagcaacaaatgttctcagcagatcgaggtcgaggttaattatcggacgatttgcacttatcatatattatcacttactggcggctcatactgagctggttaatgctgtgcacacacaaacaagcaattccatttgtaatgtgcctccctggcagtttcatccggaacccggacgaaagtaaaaatgcatatgagttgcactaaaaaagcgactcacattgttccgttataatgcctgaagtagatcacagaatatatcttcagggatcgcatatctattaagttactcactcttttctatttatgacatgcgcgtgtttgtataaatgtaaatgtgagtccttgttccactctcgtgcagcatcgctggtcatacgcgaacacgtaccaacagcaatggtgaggcggcatcaagagcagggatccgtcatttatccgagcattttaccccaaaaaccttttatttataagggtcattgcgaattatctgatgcaaagttatgttatgttaggcaaagtaatcttctattattaataagcacatcaaaacctttttgaatattaaataataattaattagcatcatcctcattcattaattccgcttaacaatagtttcacaccttgcccccattgcgacacctcggaaatcatcacgcagttaaactctccgtaatgaggaaatatcatcatcgcgtttcattagtgaattcttaaatgaggcattttcacacaattatcttacagataaaaaaaccagacttacaattaagaatcagaacaattcactatataacattgcatgtaaagcatatacacctcattattttgtcattattaagttattaacagcacaatcgagccttcccctctggcaaaatcttattctgcagaccttcaaaacaccgtcctgggggagtacattgttctaagctgacttccacggcagggagtggcgataacagcaaaaaaggtcaagattcatgtcccccattgaaaaatccagcaaattagagaatgtctgttatgacatccgtggtccggtgctgaaagaagcaaaacgcctggaagaagaaggtaacaaggtactgaaactgaacatcggcaacccagccccgttcggttttgacgcgccagatgaaatcctcgttgacgtgatacgcaacctgcctaccgctcaagggtattgcgattccaaaggtctttactccgcgcgtaaagccatcatgcagcactaccaggctcgtggcatgcgtgatgttaccgtggaagatatttacatcggcaatggtgtaagcgagcttatcgttcaggcaatgcaggcattgctgaacagcggggacgaaatgttggttcctgcaccagattacccactctggaccgcggcggttagcctttccagcggtaaagcggtgcattatctttgcgatgaatcctctgactggttcccggacctcgatgatattcgcgctaaaattacgcctcgtacgcgtgggatcgttattatcaacccaaataacccaaccggcgcggtatattccaaagagcttttaatggagattgtggagattgcacgtcagcataatctcattatcttcgccgatgaaatttatgacaaaattctctacgacgacgctgagcatcacagtattgcgccgctggcacctgacctgctgaccattacctttaacggactgagcaaaacgtaccgcgttgcaggcttccgtcaggggtggatggtgttgaacgggccgaaaaaacacgccaaaggctacatcgaaggtctggaaatgctggctagtatgcgcctgtgtgctaacgttcctgcgcaacacgccattcagaccgcgctaggtggttatcagagcatcagtgaatttattacccctggcggtcgtctttatgagcagcgtaaccgcgcgtgggaactgatcaacgatattccgggcgtttcctgcgtgaaacctcgtggtgcgctgtatatgttcccgaaaatcgacgccaaacgctttaacattcacgacgatcagaaaatggtgttggatttcctgttgcaggaaaaagttctgttggtgcaagggacggcattcaactggccgtggccggatcacttccgcattgtcacgctaccgcgtgtcgatgatatcgagctgtctttgagcaagttcgcgcgtttcctttctggttatcatcagctgtaatcttaatttcactgccggagattgcatccggcagcgttatcccgccacaatgacctgatgatgtcatcatacgtaaggtcactatgaaacagagccatttttttgcccatctctcccgcctgaaactcattaaccgctggccgctcatgcgcaacgtgcggacggaaaatgtgtccgaacacagtttgcaggtagcgatggtcgcccatgcgctggcagctatcaaaaatcgaaaatttggcggtaatgtcaacgccgaacgtatcgctttactggcgatgtaccacgatgccagtgaagtgctcaccggcgatctccctactccggtgaaatacttcaatagccaaatcgctcaggagtacaaggctattgaaaaaatcgctcagcaaaaactggtcgatatggttccggaagagctgcgggatatctttgcgccgttaattgacgagcatgcatatagcgatgaagaaaaaagcctggtgaaacaggcagatgcactgtgtgcatatctgaaatgtctggaagaactcgcggccggaaataatgaattcttgctggcaaaaacgcgactggaagcgacgcttgaagcgcgtcgcagccaggagatggactacttcatggaaatatttgttcccagcttccatcttagcctcgatgagattagccaggatagtccgctgtaagcagccggagtctgcgtcgcatcaggcaataagcgccggatgcgacatcaggctcttgtcaaaacggaaacagcatcgggatcatcaccacacaaaccgccatcacgataatggtgaacggtacccccaacttcacaaagtcactgaagctgtaatttcccggacctaaaaccagtgtgttaacaggactagaaaccggtgtcataaaggcggcggatgctgccatcgccacgaccatcgcgaatggataagggctcacccccatcgttttggcagcagccagcgcaatcggagccatcaacaccgccgtcgcggtattagagataaatagcccaataaccgcgctcaagacaaacaaacaccccagcatcatatgtggcccgtaaccaccgccaatgtccatcagccctttcaccgccagcgcgacacctcccgttttctgtaatgccacagcaaacggcatcatcccaacgatcaaaataatgctcggccagtgaatggatttataggcgctttcagcatctatacagcggaatttccccatcagcaggcaggcgatgatagcggcaacaggattaggaatttcatctgtcagcattaacgccaccattagcaccagacagaaaatggcatggggtgcctggctgtgcgcgggacttgcttcactcacctcttccggtaagttcagcgctacgaagtcgcggccctgtttggccagcataccgatcagtttccagttacccacaaccaggatgatatcgcccagcagcagaggctcatccgccaggctaccttccagcgccacgccattgcgctttagccccaccacattcagtccgtagcgggtacgaaaaccaatttcgcgcacgcttttaccaatcagttcactctcaggaattaaactaatctctgccatgcccacatcaagggcctggtcagaaaatactcgccgcgcagtaccatcggctccagcaattgctcactacaaaattgccggagatcgacatcagccgcagacatatcaataagcaaaacgtcacgcgcgcgaaattcagaaaccccattaacgttcacgataacgcgacgaaaacgccgccagcgttcaacaccgatgacgttagcgccataacgctcacgtaatttgagatcatccagccgttgaccaatcattgggcttccggggcgaatagccagacgtcgcgcacgcccggtcagtcgatattcacggataagatcgcgaaaggttcgacgcgtccagccttcgcgctgcggggtctgggtatcccctttcagcatgaaacgcatcactaacatatacaaaatacccagcaccagcacgaccaggccaataggtgttacgctaaagaaactgaagccgtgatagccttcacgcagcaattcactgttgactaccaggttcggcggcgtcgccaccagcgtcatcatgccgctaatcagcccggcaaaacttaacggcatcatcagacgactcgggctcgtttgcatacgcatggcaacgcttaacaccacgggaataaagatagcgacaacgccggtactactcataaacgcgccaagccccgcgacggtcagcatcaacaaaaccaacattttgatttcactattgcccgcaactttgaccagccatgttcccattacggtggcaacaccggtacggaccaaaccatcgccaataataaacaaggcggcaatcaggacaacgttaggatcagaaaagccggaaaatacttctgggactgtcagcgttccgcttaatgcaaacgcgacaataacaaacaaagcgaccgcatccatacgcactctgcccgtcgcaaacaagacgatggcaacggccagtaaactaagaacccaaatcaattcaccgttcacaacttatccttgttaattgagggggatgacttgattctgccataaaaaagccccgacgagacggggctaaatcatgatcaggtgtttcactgaataataacatcgccatttggctgtttggtcacagtaatttgctccagactgtggaggaccaaatcgacctcattcaggcgcggggtatctgccggagcgttaaccgcaatgacatgacaacccgccgccaggccagaaagcacgccagcgggagcatcttccaccaccacacactcctgcggcgcaagccccagcagctgcgcgcctaacagatacgcatcaggttctggttttccgcgcttcactcgctcagcggttacaaacacctctggtgcgggaagcccagctattttatggcgcgctcgcgctaccggcatggagccagaagtcacaatggcccacggaatacctgctttattcaaatgactgagtaaggcgattgcccccggaagcgcggtaataccttcggtttccgtggcctcgatgtgctccagacgcgtaaactcggcggcaatatcagcctcggatttgcccgccataaaatggcgcagagaggtgatcgcctgtttaccgtgaatgaaagccagcacctcttccggcgctaacccatgacgtctggcccagttgctccacgcccgttctaccgcaggcagggaatccaccagcgttccatcaagatcaaacagaaaacctttgcaccgcacgcgggcctcctcaggcattgataatttgattaatttcgttggcgctcaaatggtactgacgcgggcaggcatgccacacattaagcatgcgctgatatttttcccacattggcgtctgggcgttaaaaccgtgagttccggcgtcaaaatgggtatagcgcccttccacattaaccataaagcggacataaccgaggtaacgtgcttcagtggcggcgtcaaagccgaggaaggtgacacgacgttcatcgatggattgctggtcctgcaaattagaccaggaaacatgcaacgcatgatacatctccataatgtcgatgatagtgcggcaggtttcttctttcagctcgccaaactcgcgatccaattcacgcatctgtaatccgtaaccacgctcaataattgtttgcaggcgacggtaacgttcagcatttgccggatcgagcatagtcatcatcttgtactgattagacaaaataagacgttgcgcgttggtcatttccattgttgactcctgtatcactctactacggtgaaaaaaaagaaggctgagtatgccttcttttatatgcgtaatcaggggtcaattacaaatcatcaaggaaagttttatccagttgtttgaaggcgcgcttaagcgtgtcagctaatgcctggtaatcaggcttgccttcaacgggtgccaacacctgtccagactcctgcaatttaccgcgaacttcataaaaccagttaaggattgcagggggtaatggcgtgacagaacgcttgcccagccaccacaatccctgcatgggtaaacttaaggcgaacagggcagtggcaactgccggcccaagctgaccgcccagggcaatctgccagcagagagtaaatacggcgatcggcggcataaaacggatcgcataacgcgtcatcttgataacgcgattttcgacaaagaccggggcaaggcgtttttccagcggccacgtcttactgtaatgctgtccccggcgaaacaagctaaaaaaattaacagaacgattatccggcgtactcatgcttcacctcaacttcacatataaagattcaaaaatttgtgcaaattcacaactcagcgggacaacgttcaaaacattttgtcttccatacccactatcaggtatcctttagcagcctgaaggcctaagtagtacatattcattgagtcgtcaaattcatatacattatgccattggctgaaaattacgcaaaatggcatagactcaagatatttcttccatcatgcaaaaaaaatttgcagtgcatgatgttaatcataaatgtcggtgtcatcatgcgctacgctctatggctccctgacgtttttttagccacgtatcaattataggtacttccatgagcagtaagttagtactggttctgaactgcggtagttctagtctgaaatttgccatcatcgatgcagtaaatggtgaagagtacctttctggtttagccgaatgtttccacctgcccgaagcacgtatcaaatggaaaatggacggcaataaacaggaagcggctttaggtgcaggcgccgctcacagcgaagcgctcaactttatcgttaatactattctggcacaaaaaccagaactgtctgcgcagctgactgctatcggtcaccgtatcgtacacggcggcgaaaagtataccagctccgtagtgatcgatgagtctgttattcagggtatcaaagatgcagcttcttttgcaccgctgcacaacccggctcacctgatcggtatcgaagaagctctgaaatctttcccacagctgaaagacaaaaacgttgctgtatttgacaccgcgttccaccagactatgccggaagagtcttacctctacgccctgccttacaacctgtacaaagagcacggcatccgtcgttacggcgcgcacggcaccagccacttctatgtaacccaggaagcggcaaaaatgctgaacaaaccggtagaagaactgaacatcatcacctgccacctgggcaacggtggttccgtttctgctatccgcaacggtaaatgcgttgacacctctatgggcctgaccccgctggaaggtctggtcatgggtacccgttctggtgatatcgatccggcgatcatcttccacctgcacgacaccctgggcatgagcgttgacgcaatcaacaaactgctgaccaaagagtctggcctgctgggtctgaccgaagtgaccagcgactgccgctatgttgaagacaactacgcgacgaaagaagacgcgaagcgcgcaatggacgtttactgccaccgcctggcgaaatacatcggtgcctacactgcgctgatggatggtcgtctggacgctgttgtattcactggtggtatcggtgaaaatgccgcaatggttcgtgaactgtctctgggcaaactgggcgtgctgggctttgaagttgatcatgaacgcaacctggctgcacgtttcggcaaatctggtttcatcaacaaagaaggtacccgtcctgcggtggttatcccaaccaacgaagaactggttatcgcgcaagacgcgagccgcctgactgcctgatttcacaccgccagctcagctggcggtgctgttttgtaacccgccaaatcggcggtaacgaaagaggataaaccgtgtcccgtattattatgctgatccctaccggaaccagcgtcggtctgaccagcgtcagccttggcgtgatccgtgcaatggaacgcaaaggcgttcgtctgagcgttttcaaacctatcgctcagccgcgtaccggtggcgatgcgcccgatcagactacgactatcgtgcgtgcgaactcttccaccacgacggccgctgaaccgctgaaaatgagctacgttgaaggtctgctttccagcaatcagaaagatgtgctgatggaagagatcgtcgcaaactaccacgctaacaccaaagacgctgaagtcgttctggttgaaggtctggtcccgacacgtaagcaccagtttgcccagtctctgaactacgaaatcgctaaaacgctgaatgcggaaatcgtcttcgttatgtctcagggcactgacaccccggaacagctgaaagagcgtatcgaactgacccgcaacagcttcggcggtgccaaaaacaccaacatcaccggcgttatcgttaacaaactgaacgcaccggttgatgaacagggtcgtactcgcccggatctgtccgagattttcgacgactcttccaaagctaaagtaaacaatgttgatccggcgaagctgcaagaatccagcccgctgccggttctcggcgctgtgccgtggagctttgacctgatcgcgactcgtgcgatcgatatggctcgccacctgaatgcgaccatcatcaacgaaggcgacatcaatactcgccgcgttaaatccgtcgctttctgcgcacgcagcattccgcacatgctggagcacttccgtgccggttctctgctggtgacttccgcagaccgtcctgacgtgctggtggccgcttgcctggcagccatgaacggcgtagaaatcggtgccctgctgctgactggcggttacgaaatggacgcgcgcatttctaaactgtgcgaacgtgctttcgctaccggcctgccggtatttatggtgaacaccaacacctggcagacctctctgagcctgcagagcttcaacctggaagttccggttgacgatcacgaacgtatcgagaaagttcaggaatacgttgctaactacatcaacgctgactggatcgaatctctgactgccacttctgagcgcagccgtcgtctgtctccgcctgcgttccgttatcagctgactgaacttgcgcgcaaagcgggcaaacgtatcgtactgccggaaggtgacgaaccgcgtaccgttaaagcagccgctatctgtgctgaacgtggtatcgcaacttgcgtactgctgggtaatccggcagagatcaaccgtgttgcagcgtctcagggtgtagaactgggtgcagggattgaaatcgttgatccagaagtggttcgcgaaagctatgttggtcgtctggtcgaactgcgtaagaacaaaggcatgaccgaaaccgttgcccgcgaacagctggaagacaacgtggtgctcggtacgctgatgctggaacaggatgaagttgatggtctggtttccggtgctgttcacactaccgcaaacaccatccgtccgccgctgcagctgatcaaaactgcaccgggcagctccctggtatcttccgtgttcttcatgctgctgccggaacaggtttacgtttacggtgactgtgcgatcaacccggatccgaccgctgaacagctggcagaaatcgcgattcagtccgctgattccgctgcggccttcggtatcgaaccgcgcgttgctatgctctcctactccaccggtacttctggtgcaggtagcgacgtagaaaaagttcgcgaagcaactcgtctggcgcaggaaaaacgtcctgacctgatgatcgacggtccgctgcagtacgacgctgcggtaatggctgacgttgcgaaatccaaagcgccgaactctccggttgcaggtcgcgctaccgtgttcatcttcccggatctgaacaccggtaacaccacctacaaagcggtacagcgttctgccgacctgatctccatcgggccgatgctgcagggtatgcgcaagccggttaacgacctgtcccgtggcgcactggttgacgatatcgtctacaccatcgcgctgactgcgattcagtctgcacagcagcagtaatctcgtcatcatccgcagctttgcgctgcggatatctgaaccggaaataatcactatttccggttttttattctcttaatttgcattaatcctttctgattatcttgcttaactgcgctgcatcaatgaattgcgccatcccactttgcatacttaccactttgttttgtgcaagggaatatttgcgctatgtccgcaatcactgaatccaaaccaacaagaagatgggcaatgcccgatacgttggtgattatcttttttgttgctattttaaccagccttgccacctgggtagttccggtggggatgtttgacagtcaggaagtgcagtatcaggttgatggtcaaacaaaaacacgcaaagtcgtagatccacacagttttcgcattctgactaacgaagcaggcgaacctgagtatcaccgcgtacagctgttcacgacgggcgatgaacgcccgggcctgatgaacttcccgtttgaaggattaaccagtggaagcaaatacgggacagccgttggcatcatcatgtttatgctggtgattggcggcgcgtttggcattgtgatgcgtacaggaaccattgataacggtatcctggcgcttattcgccatacccgcgggaatgaaattctctttattcctgcgctgtttattctgtttagtcttggcggcgcggtatttggtatgggagaagaggccgtcgcctttgccattatcatcgcaccgctaatggtccggctgggctatgacagtattaccaccgtcctggtgacctatattgccacgcaaatcggttttgccagtagctggatgaacccgttttgtgtggtcgttgctcaggggattgccggcgttccggtgctttctggctccgggttgcgtatcgtggtgtgggttatcgccactctgattggcctgatctttaccatggtgtacgccagtcgagtgaaaaagaatcctcttctgagtcgcgtgcatgagtccgaccgcttctttcgtgaaaagcaggctgatgttgaacaacgtccgtttacctttggtgactggctggtattgattgtcctgacc
